United States Patent Application Publication US 2026/0226466 A1, published August 6, 2026 (application 19/467,969).

The application's sequence listing, which the Patent Office published only in electronic form, follows.

SEQUENCE LISTING (2084 sequences)

SEQ ID NO: 1 - DNA, 3661 bp, Homo sapiens
  source 1..3661: mol_type = genomic DNA
aagcctctcggtctgtggcagcagcgttggcccggccccgggagcggagagcgaggggaggcggagacggaggaaggtctgaggagcagcttcagtccccgccgagccgccaccgcaggtcgaggacggtcggactcccgcggcgggaggagcctgttcccctgagggtatttgaagtataccatacaactgttttgaaaatccagcgtggacaatggctactcaagctgatttgatggagttggacatggccatggaaccagacagaaaagcggctgttagtcactggcagcaacagtcttacctggactctggaatccattctggtgccactaccacagctccttctctgagtggtaaaggcaatcctgaggaagaggatgtggatacctcccaagtcctgtatgagtgggaacagggattttctcagtccttcactcaagaacaagtagctgatattgatggacagtatgcaatgactcgagctcagagggtacgagctgctatgttccctgagacattagatgagggcatgcagatcccatctacacagtttgatgctgctcatcccactaatgtccagcgtttggctgaaccatcacagatgctgaaacatgcagttgtaaacttgattaactatcaagatgatgcagaacttgccacacgtgcaatccctgaactgacaaaactgctaaatgacgaggaccaggtggtggttaataaggctgcagttatggtccatcagctttctaaaaaggaagcttccagacacgctatcatgcgttctcctcagatggtgtctgctattgtacgtaccatgcagaatacaaatgatgtagaaacagctcgttgtaccgctgggaccttgcataacctttcccatcatcgtgagggcttactggccatctttaagtctggaggcattcctgccctggtgaaaatgcttggttcaccagtggattctgtgttgttttatgccattacaactctccacaaccttttattacatcaagaaggagctaaaatggcagtgcgtttagctggtgggctgcagaaaatggttgccttgctcaacaaaacaaatgttaaattcttggctattacgacagactgccttcaaattttagcttatggcaaccaagaaagcaagctcatcatactggctagtggtggaccccaagctttagtaaatataatgaggacctatacttacgaaaaactactgtggaccacaagcagagtgctgaaggtgctatctgtctgctctagtaataagccggctattgtagaagctggtggaatgcaagctttaggacttcacctgacagatccaagtcaacgtcttgttcagaactgtctttggactctcaggaatctttcagatgctgcaactaaacaggaagggatggaaggtctccttgggactcttgttcagcttctgggttcagatgatataaatgtggtcacctgtgcagctggaattctttctaacctcacttgcaataattataagaacaagatgatggtctgccaagtgggtggtatagaggctcttgtgcgtactgtccttcgggctggtgacagggaagacatcactgagcctgccatctgtgctcttcgtcatctgaccagccgacaccaagaagcagagatggcccagaatgcagttcgccttcactatggactaccagttgtggttaagctcttacacccaccatcccactggcctctgataaaggctactgttggattgattcgaaatcttgccctttgtcccgcaaatcatgcacctttgcgtgagcagggtgccattccacgactagttcagttgcttgttcgtgcacatcaggatacccagcgccgtacgtccatgggtgggacacagcagcaatttgtggagggggtccgcatggaagaaatagttgaaggttgtaccggagcccttcacatcctagctcgggatgttcacaaccgaattgttatcagaggactaaataccattccattgtttgtgcagctgctttattctcccattgaaaacatccaaagagtagctgcaggggtcctctgtgaacttgctcaggacaaggaagctgcagaagctattgaagctgagggagccacagctcctctgacagagttacttcactctaggaatgaaggtgtggcgacatatgcagctgctgttttgttccgaatgtctgaggacaagccacaagattacaagaaacggctttcagttgagctgaccagctctctcttcagaacagagccaatggcttggaatgagactgctgatcttggacttgatattggtgcccagggagaaccccttggatatcgccaggatgatcctagctatcgttcttttcactctggtggatatggccaggatgccttgggtatggaccccatgatggaacatgagatgggtggccaccaccctggtgctgactatccagttgatgggctgccagatctggggcatgcccaggacctcatggatgggctgcctccaggtgacagcaatcagctggcctggtttgatactgacctgtaaatcatcctttaggtaagaagttttaaaaagccagtttgggtaaaatacttttactctgcctacagaacttcagaaagacttggttggtagggtgggagtggtttaggctatttgtaaatctgccacaaaaacaggtatatactttgaaaggagatgtcttggaacattggaatgttctcagatttctggttgttatgtgatcatgtgtggaagttattaactttaatgttttttgccacagcttttgcaacttaatactcaaatgagtaacatttgctgttttaaacattaatagcagcctttctctctttatacagctgtattgtctgaacttgcattgtgattggcctgtagagttgctgagagggctcgaggggtgggctggtatctcagaaagtgcctgacacactaaccaagctgagtttcctatgggaacaattgaagtaaactttttgttctggtcctttttggtcgaggagtaacaatacaaatggattttgggagtgactcaagaagtgaagaatgcacaagaatggatcacaagatggaatttatcaaaccctagccttgcttgttaaatttttttttttttttttttaagaatatctgtaatggtactgactttgcttgctttgaagtagctctttttttttttttttttttttttttgcagtaactgttttttaagtctctcgtagtgttaagttatagtgaatactgctacagcaatttctaatttttaagaattgagtaatggtgtagaacactaattcataatcactctaattaattgtaatctgaataaagtgtaacaattgtgtagcctttttgtataaaatagacaaatagaaaatggtccaattagtttcctttttaatatgcttaaaataagcaggtggatctatttcatgtttttgatcaaaaactatttgggatatgtatgggtagggtaaatcagtaagaggtgttatttggaaccttgttttggacagtttaccagttgccttttatcccaaagttgttgtaacctgctgtgatacgatgcttcaagagaaaatgcggttataaaaaatggttcagaattaaacttttaattcattc

SEQ ID NO: 2 - DNA, 3661 bp, Homo sapiens
  source 1..3661: mol_type = genomic DNA
gaatgaattaaaagtttaattctgaaccattttttataaccgcattttctcttgaagcatcgtatcacagcaggttacaacaactttgggataaaaggcaactggtaaactgtccaaaacaaggttccaaataacacctcttactgatttaccctacccatacatatcccaaatagtttttgatcaaaaacatgaaatagatccacctgcttattttaagcatattaaaaaggaaactaattggaccattttctatttgtctattttatacaaaaaggctacacaattgttacactttattcagattacaattaattagagtgattatgaattagtgttctacaccattactcaattcttaaaaattagaaattgctgtagcagtattcactataacttaacactacgagagacttaaaaaacagttactgcaaaaaaaaaaaaaaaaaaaaaaaaagagctacttcaaagcaagcaaagtcagtaccattacagatattcttaaaaaaaaaaaaaaaaaaatttaacaagcaaggctagggtttgataaattccatcttgtgatccattcttgtgcattcttcacttcttgagtcactcccaaaatccatttgtattgttactcctcgaccaaaaaggaccagaacaaaaagtttacttcaattgttcccataggaaactcagcttggttagtgtgtcaggcactttctgagataccagcccacccctcgagccctctcagcaactctacaggccaatcacaatgcaagttcagacaatacagctgtataaagagagaaaggctgctattaatgtttaaaacagcaaatgttactcatttgagtattaagttgcaaaagctgtggcaaaaaacattaaagttaataacttccacacatgatcacataacaaccagaaatctgagaacattccaatgttccaagacatctcctttcaaagtatatacctgtttttgtggcagatttacaaatagcctaaaccactcccaccctaccaaccaagtctttctgaagttctgtaggcagagtaaaagtattttacccaaactggctttttaaaacttcttacctaaaggatgatttacaggtcagtatcaaaccaggccagctgattgctgtcacctggaggcagcccatccatgaggtcctgggcatgccccagatctggcagcccatcaactggatagtcagcaccagggtggtggccacccatctcatgttccatcatggggtccatacccaaggcatcctggccatatccaccagagtgaaaagaacgatagctaggatcatcctggcgatatccaaggggttctccctgggcaccaatatcaagtccaagatcagcagtctcattccaagccattggctctgttctgaagagagagctggtcagctcaactgaaagccgtttcttgtaatcttgtggcttgtcctcagacattcggaacaaaacagcagctgcatatgtcgccacaccttcattcctagagtgaagtaactctgtcagaggagctgtggctccctcagcttcaatagcttctgcagcttccttgtcctgagcaagttcacagaggacccctgcagctactctttggatgttttcaatgggagaataaagcagctgcacaaacaatggaatggtatttagtcctctgataacaattcggttgtgaacatcccgagctaggatgtgaagggctccggtacaaccttcaactatttcttccatgcggaccccctccacaaattgctgctgtgtcccacccatggacgtacggcgctgggtatcctgatgtgcacgaacaagcaactgaactagtcgtggaatggcaccctgctcacgcaaaggtgcatgatttgcgggacaaagggcaagatttcgaatcaatccaacagtagcctttatcagaggccagtgggatggtgggtgtaagagcttaaccacaactggtagtccatagtgaaggcgaactgcattctgggccatctctgcttcttggtgtcggctggtcagatgacgaagagcacagatggcaggctcagtgatgtcttccctgtcaccagcccgaaggacagtacgcacaagagcctctataccacccacttggcagaccatcatcttgttcttataattattgcaagtgaggttagaaagaattccagctgcacaggtgaccacatttatatcatctgaacccagaagctgaacaagagtcccaaggagaccttccatcccttcctgtttagttgcagcatctgaaagattcctgagagtccaaagacagttctgaacaagacgttgacttggatctgtcaggtgaagtcctaaagcttgcattccaccagcttctacaatagccggcttattactagagcagacagatagcaccttcagcactctgcttgtggtccacagtagtttttcgtaagtataggtcctcattatatttactaaagcttggggtccaccactagccagtatgatgagcttgctttcttggttgccataagctaaaatttgaaggcagtctgtcgtaatagccaagaatttaacatttgttttgttgagcaaggcaaccattttctgcagcccaccagctaaacgcactgccattttagctccttcttgatgtaataaaaggttgtggagagttgtaatggcataaaacaacacagaatccactggtgaaccaagcattttcaccagggcaggaatgcctccagacttaaagatggccagtaagccctcacgatgatgggaaaggttatgcaaggtcccagcggtacaacgagctgtttctacatcatttgtattctgcatggtacgtacaatagcagacaccatctgaggagaacgcatgatagcgtgtctggaagcttcctttttagaaagctgatggaccataactgcagccttattaaccaccacctggtcctcgtcatttagcagttttgtcagttcagggattgcacgtgtggcaagttctgcatcatcttgatagttaatcaagtttacaactgcatgtttcagcatctgtgatggttcagccaaacgctggacattagtgggatgagcagcatcaaactgtgtagatgggatctgcatgccctcatctaatgtctcagggaacatagcagctcgtaccctctgagctcgagtcattgcatactgtccatcaatatcagctacttgttcttgagtgaaggactgagaaaatccctgttcccactcatacaggacttgggaggtatccacatcctcttcctcaggattgcctttaccactcagagaaggagctgtggtagtggcaccagaatggattccagagtccaggtaagactgttgctgccagtgactaacagccgcttttctgtctggttccatggccatgtccaactccatcaaatcagcttgagtagccattgtccacgctggattttcaaaacagttgtatggtatacttcaaataccctcaggggaacaggctcctcccgccgcgggagtccgaccgtcctcgacctgcggtggcggctcggcggggactgaagctgctcctcagaccttcctccgtctccgcctcccctcgctctccgctcccggggccgggccaacgctgctgccacagaccgagaggctt

SEQ ID NO: 3 - DNA, 3640 bp, Mus musculus
  source 1..3640: mol_type = genomic DNA
gcgcggcggaacgctccgcgcggagcggcagcggcaggatacacggtgccgcgccgcttataaatcgctccttgtgcggcgccatcttaagccctcgctcggtggcggccgcgtcagctcgtgtcctgtgaagcccgcggcccggggaggcggagacggagcacggtgggcgccgagccgtcagtgcaggaggccgaggccgagcgggcggccgcgagtgagcagcgcgcgggcctgagggtacctgaagctcagcgcacagctgctgtgacaccgctgcgtggacaatggctactcaagctgacctgatggagttggacatggccatggagccggacagaaaagctgctgtcagccactggcagcagcagtcttacttggattctggaatccattctggtgccaccaccacagctccttccctgagtggcaagggcaaccctgaggaagaagatgttgacacctcccaagtcctttatgaatgggagcaaggcttttcccagtccttcacgcaagagcaagtagctgatattgacgggcagtatgcaatgactagggctcagagggtccgagctgccatgttccctgagacgctagatgagggcatgcagatcccatccacgcagtttgacgctgctcatcccactaatgtccagcgcttggctgaaccatcacagatgttgaaacatgcagttgtcaatttgattaactatcaggatgacgcggaacttgccacacgtgcaattcctgagctgacaaaactgctaaacgatgaggaccaggtggtagttaataaagctgctgttatggtccatcagctttccaaaaaggaagcttccagacatgccatcatgcgctcccctcagatggtgtctgccattgtacgcaccatgcagaatacaaatgatgtagagacagctcgttgtactgctgggactctgcacaacctttctcaccaccgcgagggcttgctggccatctttaagtctggtggcatcccagcgctggtgaaaatgcttgggtcaccagtggattctgtactgttctacgccatcacgacactgcataatctcctgctccatcaggaaggagctaaaatggcagtgcgcctagctggtggactgcagaaaatggttgctttgctcaacaaaacaaacgtgaaattcttggctattacaacagactgccttcagatcttagcttatggcaatcaagagagcaagctcatcattctggccagtggtggaccccaagccttagtaaacataatgaggacctacacttatgagaagcttctgtggaccacaagcagagtgctgaaggtgctgtctgtctgctctagcaacaagccggccattgtagaagctggtgggatgcaggcactggggcttcatctgacagacccaagtcagcgacttgttcaaaactgtctttggactctcagaaacctttcagatgcagcgactaagcaggaagggatggaaggcctccttgggactctagtgcagcttctgggttccgatgatataaatgtggtcacctgtgcagctggaattctctctaacctcacttgcaataattacaaaaacaagatgatggtgtgccaagtgggtggcatagaggctcttgtacgcaccgtccttcgtgctggtgacagggaagacatcactgagcctgccatctgtgctcttcgtcatctgaccagccggcatcaggaagccgagatggcccagaatgccgttcgccttcattatggactgcctgttgtggttaaactcctgcacccaccatcccactggcctctgataaaggcaactgttggattgattcgaaaccttgccctttgcccagcaaatcatgcgcctttgcgggaacagggtgctattccacgactagttcagctgcttgtacgagcacatcaggacacccaacggcgcacctccatgggtggaacgcagcagcagtttgtggagggcgtgcgcatggaggagatagtagaagggtgtactggagctctccacatccttgctcgggacgttcacaaccggattgtaatccgaggactcaataccattccattgtttgtgcagttgctttattctcccattgaaaatatccaaagagtagctgcaggggtcctctgtgaacttgctcaggacaaggaggctgcagaggccattgaagctgagggagccacagctcccctgacagagttactccactccaggaatgaaggcgtggcaacatacgcagctgctgtcctattccgaatgtctgaggacaagccacaggattacaagaagcggctttcagtcgagctgaccagttccctcttcaggacagagccaatggcttggaatgagactgcagatcttggactggacattggtgcccagggagaagcccttggatatcgccaggatgatcccagctaccgttcttttcactctggtggatacggccaggatgccttggggatggaccctatgatggagcatgagatgggtggccaccaccctggtgctgactatccagttgatgggctgcctgatctgggacacgcccaggacctcatggatgggctgcccccaggtgatagcaatcagctggcctggtttgatactgacctgtaaatcgtcctttaggtaagaaagcttataaaagccagtgtgggtgaatactttactctgcctgcagaactccagaaagacttggtagggtgggaatggttttaggcctgtttgtaaatctgccaccaaacagatacataccttggaaggagatgttcatgtgtggaagtttctcacgttgatgtttttgccacagcttttgcagcgttatactcagatgagtaacatttgctgttttcaacattaatagcagcctttctctctatacagctgtagtgtctgaacgtgcattgtgattggcctgtagagttgctgagagggctcgaggggtgggctggtatctcagaaagtgcctgacacactaaccaagctgagtttcctatgggaacagtcgaagtacgctttttgttctggtcctttttggtcgaggagtaacaatacaaatggatttggggagtgactcacgcagtgaagaatgcacacgaatggatcacaagatggcgttatcaaaccctagccttgcttgttctttgttttaatatctgtagtggtgctgactttgcttgcttttattttttgcagtaactgttagtttttaagtagtgttatgttctagtgaacctgctacagcaatttctgatttctaagaaccgagtaatggtgtagaacactaattcataatcacgctaattgtaatctggagacgtgtaacattgtgtagccttttgtataaatagacagatagaaatggtccgattagtttcctttttaatatgcttaaaataagcaggtggatctatttcatgtttttgaacaaaaactttatcggggatacgtgcggtagggtaaatcagtaagaggtgttatttgagccttgttttggacagtataccagttgccttttatcccaaagttgttgtaacctgctgtgatacaatgcttcaacagatgcggttatagaaatggttcagaattaaacttttaattcattcaaaaaaaaaaaaaaaaaa

SEQ ID NO: 4 - DNA, 3640 bp, Mus musculus
  source 1..3640: mol_type = genomic DNA
ttttttttttttttttttgaatgaattaaaagtttaattctgaaccatttctataaccgcatctgttgaagcattgtatcacagcaggttacaacaactttgggataaaaggcaactggtatactgtccaaaacaaggctcaaataacacctcttactgatttaccctaccgcacgtatccccgataaagtttttgttcaaaaacatgaaatagatccacctgcttattttaagcatattaaaaaggaaactaatcggaccatttctatctgtctatttatacaaaaggctacacaatgttacacgtctccagattacaattagcgtgattatgaattagtgttctacaccattactcggttcttagaaatcagaaattgctgtagcaggttcactagaacataacactacttaaaaactaacagttactgcaaaaaataaaagcaagcaaagtcagcaccactacagatattaaaacaaagaacaagcaaggctagggtttgataacgccatcttgtgatccattcgtgtgcattcttcactgcgtgagtcactccccaaatccatttgtattgttactcctcgaccaaaaaggaccagaacaaaaagcgtacttcgactgttcccataggaaactcagcttggttagtgtgtcaggcactttctgagataccagcccacccctcgagccctctcagcaactctacaggccaatcacaatgcacgttcagacactacagctgtatagagagaaaggctgctattaatgttgaaaacagcaaatgttactcatctgagtataacgctgcaaaagctgtggcaaaaacatcaacgtgagaaacttccacacatgaacatctccttccaaggtatgtatctgtttggtggcagatttacaaacaggcctaaaaccattcccaccctaccaagtctttctggagttctgcaggcagagtaaagtattcacccacactggcttttataagctttcttacctaaaggacgatttacaggtcagtatcaaaccaggccagctgattgctatcacctgggggcagcccatccatgaggtcctgggcgtgtcccagatcaggcagcccatcaactggatagtcagcaccagggtggtggccacccatctcatgctccatcatagggtccatccccaaggcatcctggccgtatccaccagagtgaaaagaacggtagctgggatcatcctggcgatatccaagggcttctccctgggcaccaatgtccagtccaagatctgcagtctcattccaagccattggctctgtcctgaagagggaactggtcagctcgactgaaagccgcttcttgtaatcctgtggcttgtcctcagacattcggaataggacagcagctgcgtatgttgccacgccttcattcctggagtggagtaactctgtcaggggagctgtggctccctcagcttcaatggcctctgcagcctccttgtcctgagcaagttcacagaggacccctgcagctactctttggatattttcaatgggagaataaagcaactgcacaaacaatggaatggtattgagtcctcggattacaatccggttgtgaacgtcccgagcaaggatgtggagagctccagtacacccttctactatctcctccatgcgcacgccctccacaaactgctgctgcgttccacccatggaggtgcgccgttgggtgtcctgatgtgctcgtacaagcagctgaactagtcgtggaatagcaccctgttcccgcaaaggcgcatgatttgctgggcaaagggcaaggtttcgaatcaatccaacagttgcctttatcagaggccagtgggatggtgggtgcaggagtttaaccacaacaggcagtccataatgaaggcgaacggcattctgggccatctcggcttcctgatgccggctggtcagatgacgaagagcacagatggcaggctcagtgatgtcttccctgtcaccagcacgaaggacggtgcgtacaagagcctctatgccacccacttggcacaccatcatcttgtttttgtaattattgcaagtgaggttagagagaattccagctgcacaggtgaccacatttatatcatcggaacccagaagctgcactagagtcccaaggaggccttccatcccttcctgcttagtcgctgcatctgaaaggtttctgagagtccaaagacagttttgaacaagtcgctgacttgggtctgtcagatgaagccccagtgcctgcatcccaccagcttctacaatggccggcttgttgctagagcagacagacagcaccttcagcactctgcttgtggtccacagaagcttctcataagtgtaggtcctcattatgtttactaaggcttggggtccaccactggccagaatgatgagcttgctctcttgattgccataagctaagatctgaaggcagtctgttgtaatagccaagaatttcacgtttgttttgttgagcaaagcaaccattttctgcagtccaccagctaggcgcactgccattttagctccttcctgatggagcaggagattatgcagtgtcgtgatggcgtagaacagtacagaatccactggtgacccaagcattttcaccagcgctgggatgccaccagacttaaagatggccagcaagccctcgcggtggtgagaaaggttgtgcagagtcccagcagtacaacgagctgtctctacatcatttgtattctgcatggtgcgtacaatggcagacaccatctgaggggagcgcatgatggcatgtctggaagcttcctttttggaaagctgatggaccataacagcagctttattaactaccacctggtcctcatcgtttagcagttttgtcagctcaggaattgcacgtgtggcaagttccgcgtcatcctgatagttaatcaaattgacaactgcatgtttcaacatctgtgatggttcagccaagcgctggacattagtgggatgagcagcgtcaaactgcgtggatgggatctgcatgccctcatctagcgtctcagggaacatggcagctcggaccctctgagccctagtcattgcatactgcccgtcaatatcagctacttgctcttgcgtgaaggactgggaaaagccttgctcccattcataaaggacttgggaggtgtcaacatcttcttcctcagggttgcccttgccactcagggaaggagctgtggtggtggcaccagaatggattccagaatccaagtaagactgctgctgccagtggctgacagcagcttttctgtccggctccatggccatgtccaactccatcaggtcagcttgagtagccattgtccacgcagcggtgtcacagcagctgtgcgctgagcttcaggtaccctcaggcccgcgcgctgctcactcgcggccgcccgctcggcctcggcctcctgcactgacggctcggcgcccaccgtgctccgtctccgcctccccgggccgcgggcttcacaggacacgagctgacgcggccgccaccgagcgagggcttaagatggcgccgcacaaggagcgatttataagcggcgcggcaccgtgtatcctgccgctgccgctccgcgcggagcgttccgccgcgc

SEQ ID NO: 5 - DNA, 2352 bp, Rattus norvegicus
  source 1..2352: mol_type = genomic DNA
tggacaatggctactcaagctgacctcatggagttggacatggccatggagccagacagaaaggccgctgtcagccactggcagcagcaatcttacctggattctggaatccactctggtgccaccaccacagctccttccctgagtggcaagggcaatcctgaggaagaagatgtggacacctcccaagtcctttatgagtgggagcaaggcttttcccagtccttcacgcaagagcaagtagctgacattgacggtcagtacgccatgactcgggctcagagggtccgagctgccatgttccctgagacactagatgagggcatgcagatcccatccacgcagtttgatgccgctcatcccactaatgtccagcgcttggctgaaccgtcacagatgctgaaacatgcagttgtcaatttgattaactatcaggatgacgcggaacttgccacccgtgcaattcctgagctgaccaaactgctaaatgacgaggaccaggtggtcgttaataaagctgctgttatggttcaccagctttccaaaaaggaagcttccagacacgccatcatgcgctcccctcagatggtgtctgccatagtgcgcaccatgcagaatacaaatgacgtagaaacagcccgttgtaccgctgggaccctacacaacctttcccaccatcgagagggcttgttggccatctttaaatctggcggcatcccagcgctggtgaaaatgcttgggtcgccagtggattccgtactgttctacgccatcaccacgctgcataatctcctgctacatcaggaaggagctaaaatggcagtgcgcctagctggtgggctgcagaaaatggttgctttgctcaacaaaacaaacgtgaagttcttggctattacgacagactgccttcagatcttagcttacggcaatcaggaaagcaagctcatcattctggccagtggtggaccccaagccttagtaaacataatgagaacctacacgtacgagaagctcctgtggaccacaagcagagtgctgaaggtgctgtctgtctgctctagcaacaagccggccatcgtggaagctggtgggatgcaggcactggggcctcacctgacagacccgagtcagcgacttgttcaaaactgtctttggactctgagaaacttgtccgatgcagcgactaagcaggaagggatggaaggcctccttgggactctagtgcagcttctgggttctgatgatataaatgtggtcacctgcgcagctggaattctctctaacctcacttgcaataattacaaaaacaagatgatggtgtgccaagtgggtggcatagaggctcttgtgcgcactgtccttcgtgctggtgacagggaggacattaccgagcctgccatctgtgctcttcgtcatctgaccagccgacatcaggaagctgagatggcccagaatgccgttcgccttcattatggactacctgttgtggttaaactcctgcacccaccatcccactggcctctgataaaggcaactgttggattgatccgaaaccttgccctttgcccagcaaatcatgcgcctttgcgggaacagggtgcgatcccacgactagttcagctgcttgtacgagcacatcaggacacccagcggcgcacgtccatgggtggaacacagcagcagttcgtggagggcgtccgcatggaggagatagttgaagggtgcactggggctctccacatcctcgctcgggatgttcacaaccggattgtgatccgaggactcaataccattccactgtttgtgcagttgctttattctcccattgaaaatatccaaagagtagctgcaggggtcctctgtgaacttgctcaggacaaggaggctgcagaggccattgaggctgagggagccacagctcccctgacagagttgctccactccaggaatgaaggcgtggcaacatatgcggctgctgttctattccgaatgtctgaggacaagccacaggactacaagaaacggctttcggttgagctgaccagttccctcttcaggacagagccaatggcttggaatgagactgctgatctcggactggacattggtgcccagggagaagcccttggatatcgccaggacgatcccagctaccgttcttttcactctggtggatacggccaggacgccttggggatggaccctatgatggagcatgagatgggtggccaccaccctggtgctgactatccagttgatgggctgcctgacctgggacacgcccaggacctcatggacgggctgcctccaggtgatagcaatcagctggcctggtttgataccgacctgtaa

SEQ ID NO: 6 - DNA, 2352 bp, Rattus norvegicus
  source 1..2352: mol_type = genomic DNA
ttacaggtcggtatcaaaccaggccagctgattgctatcacctggaggcagcccgtccatgaggtcctgggcgtgtcccaggtcaggcagcccatcaactggatagtcagcaccagggtggtggccacccatctcatgctccatcatagggtccatccccaaggcgtcctggccgtatccaccagagtgaaaagaacggtagctgggatcgtcctggcgatatccaagggcttctccctgggcaccaatgtccagtccgagatcagcagtctcattccaagccattggctctgtcctgaagagggaactggtcagctcaaccgaaagccgtttcttgtagtcctgtggcttgtcctcagacattcggaatagaacagcagccgcatatgttgccacgccttcattcctggagtggagcaactctgtcaggggagctgtggctccctcagcctcaatggcctctgcagcctccttgtcctgagcaagttcacagaggacccctgcagctactctttggatattttcaatgggagaataaagcaactgcacaaacagtggaatggtattgagtcctcggatcacaatccggttgtgaacatcccgagcgaggatgtggagagccccagtgcacccttcaactatctcctccatgcggacgccctccacgaactgctgctgtgttccacccatggacgtgcgccgctgggtgtcctgatgtgctcgtacaagcagctgaactagtcgtgggatcgcaccctgttcccgcaaaggcgcatgatttgctgggcaaagggcaaggtttcggatcaatccaacagttgcctttatcagaggccagtgggatggtgggtgcaggagtttaaccacaacaggtagtccataatgaaggcgaacggcattctgggccatctcagcttcctgatgtcggctggtcagatgacgaagagcacagatggcaggctcggtaatgtcctccctgtcaccagcacgaaggacagtgcgcacaagagcctctatgccacccacttggcacaccatcatcttgtttttgtaattattgcaagtgaggttagagagaattccagctgcgcaggtgaccacatttatatcatcagaacccagaagctgcactagagtcccaaggaggccttccatcccttcctgcttagtcgctgcatcggacaagtttctcagagtccaaagacagttttgaacaagtcgctgactcgggtctgtcaggtgaggccccagtgcctgcatcccaccagcttccacgatggccggcttgttgctagagcagacagacagcaccttcagcactctgcttgtggtccacaggagcttctcgtacgtgtaggttctcattatgtttactaaggcttggggtccaccactggccagaatgatgagcttgctttcctgattgccgtaagctaagatctgaaggcagtctgtcgtaatagccaagaacttcacgtttgttttgttgagcaaagcaaccattttctgcagcccaccagctaggcgcactgccattttagctccttcctgatgtagcaggagattatgcagcgtggtgatggcgtagaacagtacggaatccactggcgacccaagcattttcaccagcgctgggatgccgccagatttaaagatggccaacaagccctctcgatggtgggaaaggttgtgtagggtcccagcggtacaacgggctgtttctacgtcatttgtattctgcatggtgcgcactatggcagacaccatctgaggggagcgcatgatggcgtgtctggaagcttcctttttggaaagctggtgaaccataacagcagctttattaacgaccacctggtcctcgtcatttagcagtttggtcagctcaggaattgcacgggtggcaagttccgcgtcatcctgatagttaatcaaattgacaactgcatgtttcagcatctgtgacggttcagccaagcgctggacattagtgggatgagcggcatcaaactgcgtggatgggatctgcatgccctcatctagtgtctcagggaacatggcagctcggaccctctgagcccgagtcatggcgtactgaccgtcaatgtcagctacttgctcttgcgtgaaggactgggaaaagccttgctcccactcataaaggacttgggaggtgtccacatcttcttcctcaggattgcccttgccactcagggaaggagctgtggtggtggcaccagagtggattccagaatccaggtaagattgctgctgccagtggctgacagcggcctttctgtctggctccatggccatgtccaactccatgaggtcagcttgagtagccattgtcca

SEQ ID NO: 7 - DNA, 3034 bp, Macaca fascicularis
  source 1..3034: mol_type = genomic DNA
gttacctgtatgaattaagataaggagttatgccagaatggtatttgaagtataccatacaactgttttgaaaatccagcgtggacaatggctactcaaggctaccttttgctccattttctgctcactcctcctaatggcttggtgaaatagcaaacaagccaccagcaggaatctagtctggatgactgcttctggagcctggatgcagtaccattcttccactgattcactgatttgatggagttggacatggccatggaaccagacagaaaagcggctgttagtcactggcagcaacagtcttacctggactctggaatccattctggtgccactaccacagctccttctctgagtggtaaaggcaatcctgaggaagaggatgtggatacctcccaagtcctgtatgagtgggaacagggattttctcagtccttcactcaagaacaagtagctgatattgatggacagtatgcaatgactcgagctcagagggtacgagctgctatgttccctgagacattagatgagggcatgcagatcccatctacacagtttgatgctgctcatcccactaatgtccagcgtttggctgaaccatcacagatgctgaaacatgcagttgtaaacttgattaactatcaagatgatgcagaacttgccacacgtgcaatccctgaactgacaaaactgctaaatgatgaggaccaggtggtggttaataaggctgcagttatggtccatcagctttctaaaaaggaagcttccagacacgctatcatgcgttctcctcagatggtgtctgctattgtacgtaccatgcagaatacaaatgatgtagaaacagctcgttgtaccgctgggaccttgcataacctttcccatcatcgggagggcttgttggccatctttaagtctggaggcattcctgccctggtgaaaatgcttggttcaccagtggattctgtgttgttttatgccattacaactctccacaaccttttattacatcaagaaggagctaaaatggcagtgcgtttagctggcgggctacagaaaatggttgccttgctcaacaaaacaaacgttaaattcttggctattacgacagactgccttcaaattttagcatatggcaaccaagaaagcaagctgatcatactggctagtggtggaccccaagctttagtaaatataatgaggacctatacttatgagaaactactgtggaccacaagcagagtgctgaaggtgctatccgtctgctctagtaataagccagctattgtagaagctggtggaatgcaagctttaggacttcacctgacagatccaagtcaacgtcttgttcagaactgtctttggactctcaggaatctttcagatgctgcaactaaacaggaagggatggaaggtctccttgggactcttgttcagcttctgggttcagatgatataaatgtggtcacctgtgcagctggaattctttctaacctcacttgcaataattataagaataagatgatggtctgccaagtgggtggtatagaggctcttgtgcgtactgtccttcgggctggtgacagggaagacgtcactgagcctgccatctgtgctcttcgtcatctgaccagccgacaccaagaagcagagatggcccagaatgcagttcgccttcactatggactaccagttgtggttaagctcttacacccaccatcccactggcctctgataaaggctactgttggattgattcgaaatcttgccctttgtccagcaaatcatgcacctttgcgtgagcagggtgccattccacgactagttcagttgcttgttcgtgcacatcaggatacccagcgccgtacgtccatgggtgggacacagcagcaatttgtggagggggtccgcatggaagaaatagttgaaggttgtactggagcccttcacatcctagctcgggatgttcacaaccgaattgtaatcagaggactaaataccattccattgtttgtgcagctgctttattctcccattgaaaacatccaaagagtagctgcaggggtcctctgtgaacttgctcaggacaaggaagctgcagaagcgattgaagctgagggagccacagctcctctgacagagttacttcactctaggaatgaaggtgtggcgacgtatgcagctgctgttttgttccgaatgtctgaggacaagccacaagattacaagaaacggctttcagttgagctgaccagctctctcttcagaacggagccaatggcttggaatgagactgcggatcttggacttgatattggtgcccagggagaaccccttggatatcgccaggatgatcctagctatcgttcttttcactctggtggatatggccaggatgccttgggtatggaccccatgatggaacatgagatgggtggccaccaccctggtgctgactatccagttgatgggctgccagatctgggacatgcccaggacctcatggatgggctgcctccaggtgatagcaatcagctggcctggtttgatactgacctgtaaatcatcctttaggtaagaagttttaaaaagccagtttgggtaaaatacttttactctgcctacagaatttcagaaagacttggttggtagggtgggagtgatttaggctatttgtaaatctgccacaaaaacaggtatatactttgaaaggagatgtcttggaacatcggaatgttctcagatttctggttgttatgtgatcatgtgtggaagttattaactttaatgttttttgccgcagcttttgcaacttaatactcaaatgagtaacatttgctgttttaaacattaatagcagcctttctctctttatacagctgtattgtctgaacttgcattgtgattggcctgtagagttgctgagagggctcgaggggtgggctggtatctcagaaagtgcctgacacactaaccaagctgagtttcctatgggaacaattgaagtaaacttaaaaaaaaaaaaaaaaaa

SEQ ID NO: 8 - DNA, 3034 bp, Macaca fascicularis
  source 1..3034: mol_type = genomic DNA
ttttttttttttttttttaagtttacttcaattgttcccataggaaactcagcttggttagtgtgtcaggcactttctgagataccagcccacccctcgagccctctcagcaactctacaggccaatcacaatgcaagttcagacaatacagctgtataaagagagaaaggctgctattaatgtttaaaacagcaaatgttactcatttgagtattaagttgcaaaagctgcggcaaaaaacattaaagttaataacttccacacatgatcacataacaaccagaaatctgagaacattccgatgttccaagacatctcctttcaaagtatatacctgtttttgtggcagatttacaaatagcctaaatcactcccaccctaccaaccaagtctttctgaaattctgtaggcagagtaaaagtattttacccaaactggctttttaaaacttcttacctaaaggatgatttacaggtcagtatcaaaccaggccagctgattgctatcacctggaggcagcccatccatgaggtcctgggcatgtcccagatctggcagcccatcaactggatagtcagcaccagggtggtggccacccatctcatgttccatcatggggtccatacccaaggcatcctggccatatccaccagagtgaaaagaacgatagctaggatcatcctggcgatatccaaggggttctccctgggcaccaatatcaagtccaagatccgcagtctcattccaagccattggctccgttctgaagagagagctggtcagctcaactgaaagccgtttcttgtaatcttgtggcttgtcctcagacattcggaacaaaacagcagctgcatacgtcgccacaccttcattcctagagtgaagtaactctgtcagaggagctgtggctccctcagcttcaatcgcttctgcagcttccttgtcctgagcaagttcacagaggacccctgcagctactctttggatgttttcaatgggagaataaagcagctgcacaaacaatggaatggtatttagtcctctgattacaattcggttgtgaacatcccgagctaggatgtgaagggctccagtacaaccttcaactatttcttccatgcggaccccctccacaaattgctgctgtgtcccacccatggacgtacggcgctgggtatcctgatgtgcacgaacaagcaactgaactagtcgtggaatggcaccctgctcacgcaaaggtgcatgatttgctggacaaagggcaagatttcgaatcaatccaacagtagcctttatcagaggccagtgggatggtgggtgtaagagcttaaccacaactggtagtccatagtgaaggcgaactgcattctgggccatctctgcttcttggtgtcggctggtcagatgacgaagagcacagatggcaggctcagtgacgtcttccctgtcaccagcccgaaggacagtacgcacaagagcctctataccacccacttggcagaccatcatcttattcttataattattgcaagtgaggttagaaagaattccagctgcacaggtgaccacatttatatcatctgaacccagaagctgaacaagagtcccaaggagaccttccatcccttcctgtttagttgcagcatctgaaagattcctgagagtccaaagacagttctgaacaagacgttgacttggatctgtcaggtgaagtcctaaagcttgcattccaccagcttctacaatagctggcttattactagagcagacggatagcaccttcagcactctgcttgtggtccacagtagtttctcataagtataggtcctcattatatttactaaagcttggggtccaccactagccagtatgatcagcttgctttcttggttgccatatgctaaaatttgaaggcagtctgtcgtaatagccaagaatttaacgtttgttttgttgagcaaggcaaccattttctgtagcccgccagctaaacgcactgccattttagctccttcttgatgtaataaaaggttgtggagagttgtaatggcataaaacaacacagaatccactggtgaaccaagcattttcaccagggcaggaatgcctccagacttaaagatggccaacaagccctcccgatgatgggaaaggttatgcaaggtcccagcggtacaacgagctgtttctacatcatttgtattctgcatggtacgtacaatagcagacaccatctgaggagaacgcatgatagcgtgtctggaagcttcctttttagaaagctgatggaccataactgcagccttattaaccaccacctggtcctcatcatttagcagttttgtcagttcagggattgcacgtgtggcaagttctgcatcatcttgatagttaatcaagtttacaactgcatgtttcagcatctgtgatggttcagccaaacgctggacattagtgggatgagcagcatcaaactgtgtagatgggatctgcatgccctcatctaatgtctcagggaacatagcagctcgtaccctctgagctcgagtcattgcatactgtccatcaatatcagctacttgttcttgagtgaaggactgagaaaatccctgttcccactcatacaggacttgggaggtatccacatcctcttcctcaggattgcctttaccactcagagaaggagctgtggtagtggcaccagaatggattccagagtccaggtaagactgttgctgccagtgactaacagccgcttttctgtctggttccatggccatgtccaactccatcaaatcagtgaatcagtggaagaatggtactgcatccaggctccagaagcagtcatccagactagattcctgctggtggcttgtttgctatttcaccaagccattaggaggagtgagcagaaaatggagcaaaaggtagccttgagtagccattgtccacgctggattttcaaaacagttgtatggtatacttcaaataccattctggcataactccttatcttaattcatacaggtaac

SEQ ID NO: 9 - DNA, 3405 bp, Macaca mulatta
  source 1..3405: mol_type = genomic DNA
ggcagcttttgggcgacttataagagctccttgtgcggcgccattttaagcctcttggtctgtggcagccgtgttggcccggccccgagagcggagagcgaggggaggcggagacggaggaaggtccgaggagcagcttcagtcctcgccgagccgccaccgcaggtcgaggacggtcggactcccgcgacgggaggagcctgttcccctgagggtatttgaagtataccatacaactgttttgaaaatccagcgtggacaatggctactcaagctgatttgatggagttggacatggccatggaaccagacagaaaagcggctgttagtcactggcagcaacagtcttacctggactctggaatccattctggtgccactaccacagctccttctctgagtggtaaaggcaatcctgaggaagaggatgtggatacctcccaagtcctgtatgagtgggaacagggattttctcagtccttcactcaagaacaagtagctgatattgatggacagtatgcaatgactcgagctcagagggtacgagctgctatgttccctgagacattagatgagggcatgcagatcccatctacacagtttgatgctgctcatcccactaatgtccagcgtttggctgaaccatcacagatgctgaaacatgcagttgtaaacttgattaactatcaagatgatgcagaacttgccacacgtgcaattcctgaactgacaaaactgctaaatgatgaggaccaggtggtggttaataaggctgcagttatggtccatcagctttctaaaaaggaagcttccagacacgctatcatgcgttctcctcagatggtgtctgctattgtacgtaccatgcagaatacaaatgatgtagaaacagctcgttgtaccgctgggaccttgcataacctttcccatcatcgggagggcttgttggccatctttaagtctggaggcattcctgccctggtgaaaatgcttggttcaccagtggattctgtgttgttttatgccattacaactctccacaaccttttattacatcaagaaggagctaaaatggcagtgcgtttagctggcgggctacagaaaatggttgccttgctcaacaaaacaaacgttaaattcttggctattacgacagactgccttcaaattttagcatatggcaaccaagaaagcaagctgatcatactggctagtggtggaccccaagctttagtaaatataatgaggacctatacttatgagaaactactgtggaccacaagcagagtgctgaaggtgctatccgtctgctctagtaataagccagctattgtagaagctggtggaatgcaagctttaggacttcacctgacagatccaagtcaacgtcttgttcagaactgtctttggactctcaggaatctttcagatgctgcaactaaacaggaagggatggaaggtctccttgggactcttgttcagcttctgggttcagatgatataaatgtggtcacctgtgcagctggaattctttctaacctcacttgcaataattataagaataagatgatggtctgccaagtgggtggtatagaggctcttgtgcgtactgtccttcgggctggtgacagggaagacatcactgagcctgccatctgtgctcttcgtcatctgaccagccgacaccaagaagcagagatggcccagaatgcagttcgccttcactatggactaccagttgtggttaagctcttacacccaccatcccactggcctctgataaaggctactgttggattgattcgaaatcttgccctttgtccagcaaatcatgcacctttgcgtgagcagggtgccattccacgactagttcagttgcttgttcgtgcacatcaggatacccagcgccgtacgtccatgggtgggacacagcagcaatttgtggagggggtccgcatggaagaaatagttgaaggttgtactggagcccttcacatcctagctcgggatgttcacaaccgaattgtaatcagaggactaaataccattccattgtttgtgcagctgctttattctcccattgaaaacatccaaagagtagctgcaggggtcctctgtgaacttgctcaggacaaggaagctgcagaagcgattgaagctgagggagccacagctcctctgacagagttacttcactctaggaatgaaggtgtggcgacgtatgcagctgctgttttgttccgaatgtctgaggacaagccacaagattacaagaaacggctttcagttgagctgaccagctctctcttcagaacggagccaatggcttggaatgagactgcggatcttggacttgatattggtgcccagggagaaccccttggatatcgccaggatgatcctagctatcgttcttttcactctggtggatatggccaggatgccttgggtatggaccccatgatggaacatgagatgggtggccaccaccctggtgctgactatccagttgatgggctgccagatctgggacatgcccaggacctcatggatgggctgcctccaggtgatagcaatcagctggcctggtttgatactgacctgtaaatcatcctttagctgtattgtctgaacttgcattgtgattggcctgtagagttgctgagagggctcgaggggtgggctggtatctcagaaagtgcctgacacactaaccaagctgagtttcctatgggaacaattgaagtaaactttttgttctggtcctttttggtcgaggagtaacaatacaaatggattttgggagtgactcaagaagtgaagaatgcacaagaatggatcacaagatggaatttatcaaaccctagccttgcttgttaaattttttttttttttaatatctgtaatggtactgactttgcttgctttgaagtagctctttaatttttttttttttttttttttttttgcagtaactgttagtttaagtctctcgtagtgttaagttatagtgaatactgctacagcaatttctaatttttaagaattgagtaatggtgtagaacactaattcataatcactctaataattgtaatctgaataaagtgtaacattgtgtagcctttttgtataaaatagacaaatagaaaatggtccaattagtttcctttttaatatgcttaaaataagcaggtggatctatttcatgtttttgatcaaaaactttatttgggatatgtatgggtagggtaaatcagtaagaggtgttatttggaaccttgttttggacagtttaccagttgccttttatcccaaagttgttgtaacctgctgtgatacaatgcttcaagagaaaatgcggttataaaaaatggttcagaattaaacttttaattcattcaaaa

SEQ ID NO: 10 - DNA, 3405 bp, Macaca mulatta
  source 1..3405: mol_type = genomic DNA
ttttgaatgaattaaaagtttaattctgaaccattttttataaccgcattttctcttgaagcattgtatcacagcaggttacaacaactttgggataaaaggcaactggtaaactgtccaaaacaaggttccaaataacacctcttactgatttaccctacccatacatatcccaaataaagtttttgatcaaaaacatgaaatagatccacctgcttattttaagcatattaaaaaggaaactaattggaccattttctatttgtctattttatacaaaaaggctacacaatgttacactttattcagattacaattattagagtgattatgaattagtgttctacaccattactcaattcttaaaaattagaaattgctgtagcagtattcactataacttaacactacgagagacttaaactaacagttactgcaaaaaaaaaaaaaaaaaaaaaaaaattaaagagctacttcaaagcaagcaaagtcagtaccattacagatattaaaaaaaaaaaaaatttaacaagcaaggctagggtttgataaattccatcttgtgatccattcttgtgcattcttcacttcttgagtcactcccaaaatccatttgtattgttactcctcgaccaaaaaggaccagaacaaaaagtttacttcaattgttcccataggaaactcagcttggttagtgtgtcaggcactttctgagataccagcccacccctcgagccctctcagcaactctacaggccaatcacaatgcaagttcagacaatacagctaaaggatgatttacaggtcagtatcaaaccaggccagctgattgctatcacctggaggcagcccatccatgaggtcctgggcatgtcccagatctggcagcccatcaactggatagtcagcaccagggtggtggccacccatctcatgttccatcatggggtccatacccaaggcatcctggccatatccaccagagtgaaaagaacgatagctaggatcatcctggcgatatccaaggggttctccctgggcaccaatatcaagtccaagatccgcagtctcattccaagccattggctccgttctgaagagagagctggtcagctcaactgaaagccgtttcttgtaatcttgtggcttgtcctcagacattcggaacaaaacagcagctgcatacgtcgccacaccttcattcctagagtgaagtaactctgtcagaggagctgtggctccctcagcttcaatcgcttctgcagcttccttgtcctgagcaagttcacagaggacccctgcagctactctttggatgttttcaatgggagaataaagcagctgcacaaacaatggaatggtatttagtcctctgattacaattcggttgtgaacatcccgagctaggatgtgaagggctccagtacaaccttcaactatttcttccatgcggaccccctccacaaattgctgctgtgtcccacccatggacgtacggcgctgggtatcctgatgtgcacgaacaagcaactgaactagtcgtggaatggcaccctgctcacgcaaaggtgcatgatttgctggacaaagggcaagatttcgaatcaatccaacagtagcctttatcagaggccagtgggatggtgggtgtaagagcttaaccacaactggtagtccatagtgaaggcgaactgcattctgggccatctctgcttcttggtgtcggctggtcagatgacgaagagcacagatggcaggctcagtgatgtcttccctgtcaccagcccgaaggacagtacgcacaagagcctctataccacccacttggcagaccatcatcttattcttataattattgcaagtgaggttagaaagaattccagctgcacaggtgaccacatttatatcatctgaacccagaagctgaacaagagtcccaaggagaccttccatcccttcctgtttagttgcagcatctgaaagattcctgagagtccaaagacagttctgaacaagacgttgacttggatctgtcaggtgaagtcctaaagcttgcattccaccagcttctacaatagctggcttattactagagcagacggatagcaccttcagcactctgcttgtggtccacagtagtttctcataagtataggtcctcattatatttactaaagcttggggtccaccactagccagtatgatcagcttgctttcttggttgccatatgctaaaatttgaaggcagtctgtcgtaatagccaagaatttaacgtttgttttgttgagcaaggcaaccattttctgtagcccgccagctaaacgcactgccattttagctccttcttgatgtaataaaaggttgtggagagttgtaatggcataaaacaacacagaatccactggtgaaccaagcattttcaccagggcaggaatgcctccagacttaaagatggccaacaagccctcccgatgatgggaaaggttatgcaaggtcccagcggtacaacgagctgtttctacatcatttgtattctgcatggtacgtacaatagcagacaccatctgaggagaacgcatgatagcgtgtctggaagcttcctttttagaaagctgatggaccataactgcagccttattaaccaccacctggtcctcatcatttagcagttttgtcagttcaggaattgcacgtgtggcaagttctgcatcatcttgatagttaatcaagtttacaactgcatgtttcagcatctgtgatggttcagccaaacgctggacattagtgggatgagcagcatcaaactgtgtagatgggatctgcatgccctcatctaatgtctcagggaacatagcagctcgtaccctctgagctcgagtcattgcatactgtccatcaatatcagctacttgttcttgagtgaaggactgagaaaatccctgttcccactcatacaggacttgggaggtatccacatcctcttcctcaggattgcctttaccactcagagaaggagctgtggtagtggcaccagaatggattccagagtccaggtaagactgttgctgccagtgactaacagccgcttttctgtctggttccatggccatgtccaactccatcaaatcagcttgagtagccattgtccacgctggattttcaaaacagttgtatggtatacttcaaataccctcaggggaacaggctcctcccgtcgcgggagtccgaccgtcctcgacctgcggtggcggctcggcgaggactgaagctgctcctcggaccttcctccgtctccgcctcccctcgctctccgctctcggggccgggccaacacggctgccacagaccaagaggcttaaaatggcgccgcacaaggagctcttataagtcgcccaaaagctgcc

SEQ ID NO: 11-13 - skipped (3 entries)

SEQ ID NO: 14 - protein, 16 aa, synthetic construct
AAVALLPAVLLALLAP

SEQ ID NO: 15 - protein, 11 aa, synthetic construct
AALLPVLLAAP

SEQ ID NO: 16 - protein, 13 aa, Human immunodeficiency virus
GRKKRRQRRRPPQ

SEQ ID NO: 17 - protein, 16 aa, Drosophila sp.
RQIKIWFQNRRMKWKK

SEQ ID NO: 18 - RNA, 21 nt, synthetic construct
  source 1..21: mol_type = other RNA
gagggtatttgaagtatacca

SEQ ID NO: 19 - RNA, 21 nt, synthetic construct
  source 1..21: mol_type = other RNA
gagggtatttgaagtatacca

SEQ ID NO: 20 - RNA, 21 nt, synthetic construct
  source 1..21: mol_type = other RNA
gggtatttgaagtataccata

SEQ ID NO: 21 - RNA, 21 nt, synthetic construct
  source 1..21: mol_type = other RNA
ggtatttgaagtataccataa

SEQ ID NO: 22 - RNA, 21 nt, synthetic construct
  source 1..21: mol_type = other RNA
tttgaagtataccatacaaca

SEQ ID NO: 23 - RNA, 21 nt, synthetic construct
  source 1..21: mol_type = other RNA
ttgaagtataccatacaacta

SEQ ID NO: 24 - RNA, 21 nt, synthetic construct
  source 1..21: mol_type = other RNA
tggacaatggctactcaagca

SEQ ID NO: 25 - RNA, 21 nt, synthetic construct
  source 1..21: mol_type = other RNA
gacaatggctactcaagctga

SEQ ID NO: 26 - RNA, 21 nt, synthetic construct
  source 1..21: mol_type = other RNA
acaatggctactcaagctgaa

SEQ ID NO: 27 - RNA, 21 nt, synthetic construct
  source 1..21: mol_type = other RNA
aagctgatttgatggagttga

SEQ ID NO: 28 - RNA, 21 nt, synthetic construct
  source 1..21: mol_type = other RNA
agctgatttgatggagttgga

SEQ ID NO: 29 - RNA, 21 nt, synthetic construct
  source 1..21: mol_type = other RNA
ccttctctgagtggtaaagga

SEQ ID NO: 30 - RNA, 21 nt, synthetic construct
  source 1..21: mol_type = other RNA
cagtccttcactcaagaacaa

SEQ ID NO: 31 - RNA, 21 nt, synthetic construct
  source 1..21: mol_type = other RNA
cttcactcaagaacaagtaga

SEQ ID NO: 32 - RNA, 21 nt, synthetic construct
  source 1..21: mol_type = other RNA
cactcaagaacaagtagctga

SEQ ID NO: 33 - RNA, 21 nt, synthetic construct
  source 1..21: mol_type = other RNA
gtagctgatattgatggacaa

SEQ ID NO: 34 - RNA, 21 nt, synthetic construct
  source 1..21: mol_type = other RNA
attgatggacagtatgcaata

SEQ ID NO: 35 - RNA, 21 nt, synthetic construct
  source 1..21: mol_type = other RNA
agtatgcaatgactcgagcta

SEQ ID NO: 36 - RNA, 21 nt, synthetic construct
  source 1..21: mol_type = other RNA
ggtacgagctgctatgttcca

SEQ ID NO: 37 - RNA, 21 nt, synthetic construct
  source 1..21: mol_type = other RNA
acgagctgctatgttccctga

SEQ ID NO: 38 - RNA, 21 nt, synthetic construct
  source 1..21: mol_type = other RNA
tgttccctgagacattagata

SEQ ID NO: 39 - RNA, 21 nt, synthetic construct
  source 1..21: mol_type = other RNA
ttccctgagacattagatgaa

SEQ ID NO: 40 - RNA, 21 nt, synthetic construct
  source 1..21: mol_type = other RNA
agatgagggcatgcagatcca

SEQ ID NO: 41 - RNA, 21 nt, synthetic construct
  source 1..21: mol_type = other RNA
ctgctcatcccactaatgtca

SEQ ID NO: 42 - RNA, 21 nt, synthetic construct
  source 1..21: mol_type = other RNA
accatcacagatgctgaaaca

SEQ ID NO: 43 - RNA, 21 nt, synthetic construct
  source 1..21: mol_type = other RNA
catcacagatgctgaaacata

SEQ ID NO: 44 - RNA, 21 nt, synthetic construct
  source 1..21: mol_type = other RNA
catcacagatgctgaaacata

SEQ ID NO: 45 - RNA, 21 nt, synthetic construct
  source 1..21: mol_type = other RNA
atgctgaaacatgcagttgta

SEQ ID NO: 46 - RNA, 21 nt, synthetic construct
  source 1..21: mol_type = other RNA
atgctgaaacatgcagttgta

SEQ ID NO: 47 - RNA, 21 nt, synthetic construct
  source 1..21: mol_type = other RNA
acatgcagttgtaaacttgaa

SEQ ID NO: 48 - RNA, 21 nt, synthetic construct
  source 1..21: mol_type = other RNA
atgcagttgtaaacttgatta

SEQ ID NO: 49 - RNA, 21 nt, synthetic construct
  source 1..21: mol_type = other RNA
atgcagttgtaaacttgatta

SEQ ID NO: 50 - RNA, 21 nt, synthetic construct
  source 1..21: mol_type = other RNA
acgtgcaatccctgaactgaa

SEQ ID NO: 51 - RNA, 21 nt, synthetic construct
  source 1..21: mol_type = other RNA
tgcaatccctgaactgacaaa

SEQ ID NO: 52 - RNA, 21 nt, synthetic construct
  source 1..21: mol_type = other RNA
gaccaggtggtggttaataaa

SEQ ID NO: 53 - RNA, 21 nt, synthetic construct
  source 1..21: mol_type = other RNA
gaccaggtggtggttaataaa

SEQ ID NO: 54 - RNA, 21 nt, synthetic construct
  source 1..21: mol_type = other RNA
ccaggtggtggttaataagga

SEQ ID NO: 55 - RNA, 21 nt, synthetic construct
  source 1..21: mol_type = other RNA
gttaataaggctgcagttata

SEQ ID NO: 56 - RNA, 21 nt, synthetic construct
  source 1..21: mol_type = other RNA
cctcagatggtgtctgctata

SEQ ID NO: 57 - RNA, 21 nt, synthetic construct
  source 1..21: mol_type = other RNA
tcagatggtgtctgctattga

SEQ ID NO: 58 - RNA, 21 nt, synthetic construct
  source 1..21: mol_type = other RNA
agatggtgtctgctattgtaa

SEQ ID NO: 59 - RNA, 21 nt, synthetic construct
  source 1..21: mol_type = other RNA
agatggtgtctgctattgtaa

SEQ ID NO: 60 - RNA, 21 nt, synthetic construct
  source 1..21: mol_type = other RNA
acgtaccatgcagaatacaaa

SEQ ID NO: 61 - RNA, 21 nt, synthetic construct
  source 1..21: mol_type = other RNA
acgtaccatgcagaatacaaa

SEQ ID NO: 62 - RNA, 21 nt, synthetic construct
  source 1..21: mol_type = other RNA
cgtaccatgcagaatacaaaa

SEQ ID NO: 63 - RNA, 21 nt, synthetic construct
  source 1..21: mol_type = other RNA
gtaccatgcagaatacaaata

SEQ ID NO: 64 - RNA, 21 nt, synthetic construct
  source 1..21: mol_type = other RNA
taccatgcagaatacaaatga

SEQ ID NO: 65 - RNA, 21 nt, synthetic construct
  source 1..21: mol_type = other RNA
accatgcagaatacaaatgaa

SEQ ID NO: 66 - RNA, 21 nt, synthetic construct
  source 1..21: mol_type = other RNA
ccatgcagaatacaaatgata

SEQ ID NO: 67 - RNA, 21 nt, synthetic construct
  source 1..21: mol_type = other RNA
catgcagaatacaaatgatga

SEQ ID NO: 68 - RNA, 21 nt, synthetic construct
  source 1..21: mol_type = other RNA
atgcagaatacaaatgatgta

SEQ ID NO: 69 - RNA, 21 nt, synthetic construct
  source 1..21: mol_type = other RNA
gcagaatacaaatgatgtaga

SEQ ID NO: 70 - RNA, 21 nt, synthetic construct
  source 1..21: mol_type = other RNA
cagaatacaaatgatgtagaa

SEQ ID NO: 71 - RNA, 21 nt, synthetic construct
  source 1..21: mol_type = other RNA
tgatgtagaaacagctcgtta

SEQ ID NO: 72 - RNA, 21 nt, synthetic construct
  source 1..21: mol_type = other RNA
gatgtagaaacagctcgttga

SEQ ID NO: 73 - RNA, 21 nt, synthetic construct
  source 1..21: mol_type = other RNA
actggccatctttaagtctga

SEQ ID NO: 74 - RNA, 21 nt, synthetic construct
  source 1..21: mol_type = other RNA
ctggccatctttaagtctgga

SEQ ID NO: 75 - RNA, 21 nt, synthetic construct
  source 1..21: mol_type = other RNA
tggccatctttaagtctggaa

SEQ ID NO: 76 - RNA, 21 nt, synthetic construct
  source 1..21: mol_type = other RNA
ggccatctttaagtctggaga

SEQ ID NO: 77 - RNA, 21 nt, synthetic construct
  source 1..21: mol_type = other RNA
gccatctttaagtctggagga

SEQ ID NO: 78 - RNA, 21 nt, synthetic construct
  source 1..21: mol_type = other RNA
tggttcaccagtggattctga

SEQ ID NO: 79 - RNA, 21 nt, synthetic construct
  source 1..21: mol_type = other RNA
accagtggattctgtgttgta

SEQ ID NO: 80 - RNA, 21 nt, synthetic construct
  source 1..21: mol_type = other RNA
atggcagtgcgtttagctgga

SEQ ID NO: 81 - RNA, 21 nt, synthetic construct
  source 1..21: mol_type = other RNA
atggcagtgcgtttagctgga

SEQ ID NO: 82 - RNA, 21 nt, synthetic construct
  source 1..21: mol_type = other RNA
ttgccttgctcaacaaaacaa

SEQ ID NO: 83 - RNA, 21 nt, synthetic construct
  source 1..21: mol_type = other RNA
tgccttgctcaacaaaacaaa

SEQ ID NO: 84 - RNA, 21 nt, synthetic construct
  source 1..21: mol_type = other RNA
tgccttgctcaacaaaacaaa

SEQ ID NO: 85 - RNA, 21 nt, synthetic construct
  source 1..21: mol_type = other RNA
gccttgctcaacaaaacaaaa

SEQ ID NO: 86 - RNA, 21 nt, synthetic construct
  source 1..21: mol_type = other RNA
ttaaattcttggctattacga

SEQ ID NO: 87 - RNA, 21 nt, synthetic construct
  source 1..21: mol_type = other RNA
attcttggctattacgacaga

SEQ ID NO: 88 - RNA, 21 nt, synthetic construct
  source 1..21: mol_type = other RNA
ggctattacgacagactgcca

SEQ ID NO: 89 - RNA, 21 nt, synthetic construct
  source 1..21: mol_type = other RNA
tacgacagactgccttcaaaa

SEQ ID NO: 90 - RNA, 21 nt, synthetic construct
  source 1..21: mol_type = other RNA
ctttagtaaatataatgagga

SEQ ID NO: 91 - RNA, 21 nt, synthetic construct
  source 1..21: mol_type = other RNA
tataatgaggacctatactta

SEQ ID NO: 92 - RNA, 21 nt, synthetic construct
  source 1..21: mol_type = other RNA
agctggtggaatgcaagctta

SEQ ID NO: 93 - RNA, 21 nt, synthetic construct
  source 1..21: mol_type = other RNA
cagatccaagtcaacgtctta

SEQ ID NO: 94 - RNA, 21 nt, synthetic construct
  source 1..21: mol_type = other RNA
ccaagtcaacgtcttgttcaa

SEQ ID NO: 95 - RNA, 21 nt, synthetic construct
  source 1..21: mol_type = other RNA
ccaagtcaacgtcttgttcaa

SEQ ID NO: 96 - RNA, 21 nt, synthetic construct
  source 1..21: mol_type = other RNA
agaactgtctttggactctca

SEQ ID NO: 97 - RNA, 21 nt, synthetic construct
  source 1..21: mol_type = other RNA
ctttcagatgctgcaactaaa

SEQ ID NO: 98 - RNA, 21 nt, synthetic construct
  source 1..21: mol_type = other RNA
tcagatgctgcaactaaacaa

SEQ ID NO: 99 - RNA, 21 nt, synthetic construct
  source 1..21: mol_type = other RNA
gatgctgcaactaaacaggaa

SEQ ID NO: 100 - RNA, 21 nt, synthetic construct
  source 1..21: mol_type = other RNA
ctgcaactaaacaggaaggga

SEQ ID NO: 101 - RNA, 21 nt, synthetic construct
  source 1..21: mol_type = other RNA
gaagggatggaaggtctccta

SEQ ID NO: 102 - RNA, 21 nt, synthetic construct
  source 1..21: mol_type = other RNA
cttctgggttcagatgatata

SEQ ID NO: 103 - RNA, 21 nt, synthetic construct
  source 1..21: mol_type = other RNA
cctgtgcagctggaattctta

SEQ ID NO: 104 - RNA, 21 nt, synthetic construct
  source 1..21: mol_type = other RNA
tgtgcagctggaattctttca

SEQ ID NO: 105 - RNA, 21 nt, synthetic construct
  source 1..21: mol_type = other RNA
aattctttctaacctcactta

SEQ ID NO: 106 - RNA, 21 nt, synthetic construct
  source 1..21: mol_type = other RNA
ttctttctaacctcacttgca

SEQ ID NO: 107 - RNA, 21 nt, synthetic construct
  source 1..21: mol_type = other RNA
ctttctaacctcacttgcaaa

SEQ ID NO: 108 - RNA, 21 nt, synthetic construct
  source 1..21: mol_type = other RNA
tttctaacctcacttgcaata

SEQ ID NO: 109 - RNA, 21 nt, synthetic construct
  source 1..21: mol_type = other RNA
ctaacctcacttgcaataata

SEQ ID NO: 110 - RNA, 21 nt, synthetic construct
  source 1..21: mol_type = other RNA
taacctcacttgcaataatta

SEQ ID NO: 111 - RNA, 21 nt, synthetic construct
  source 1..21: mol_type = other RNA
aacctcacttgcaataattaa

SEQ ID NO: 112 - RNA, 21 nt, synthetic construct
  source 1..21: mol_type = other RNA
acctcacttgcaataattata

SEQ ID NO: 113 - RNA, 21 nt, synthetic construct
  source 1..21: mol_type = other RNA
cctcacttgcaataattataa

SEQ ID NO: 114 - RNA, 21 nt, synthetic construct
  source 1..21: mol_type = other RNA
ctcacttgcaataattataaa

SEQ ID NO: 115 - RNA, 21 nt, synthetic construct
  source 1..21: mol_type = other RNA
ctcacttgcaataattataaa

SEQ ID NO: 116 - RNA, 21 nt, synthetic construct
  source 1..21: mol_type = other RNA
tcacttgcaataattataaga

SEQ ID NO: 117 - RNA, 21 nt, synthetic construct
  source 1..21: mol_type = other RNA
cacttgcaataattataagaa

SEQ ID NO: 118 - RNA, 21 nt, synthetic construct
  source 1..21: mol_type = other RNA
caagtgggtggtatagaggca

SEQ ID NO: 119 - RNA, 21 nt, synthetic construct
  source 1..21: mol_type = other RNA
gctcttgtgcgtactgtccta

SEQ ID NO: 120 - RNA, 21 nt, synthetic construct
  source 1..21: mol_type = other RNA
cctgccatctgtgctcttcga

SEQ ID NO: 121 - RNA, 21 nt, synthetic construct
  source 1..21: mol_type = other RNA
ctgccatctgtgctcttcgta

SEQ ID NO: 122 - RNA, 21 nt, synthetic construct
  source 1..21: mol_type = other RNA
tgccatctgtgctcttcgtca

SEQ ID NO: 123 - RNA, 21 nt, synthetic construct
  source 1..21: mol_type = other RNA
gccatctgtgctcttcgtcaa

SEQ ID NO: 124 - RNA, 21 nt, synthetic construct
  source 1..21: mol_type = other RNA
ccatctgtgctcttcgtcata

SEQ ID NO: 125 - RNA, 21 nt, synthetic construct
  source 1..21: mol_type = other RNA
atctgtgctcttcgtcatcta

SEQ ID NO: 126 - RNA, 21 nt, synthetic construct
  source 1..21: mol_type = other RNA
tctgtgctcttcgtcatctga

SEQ ID NO: 127 - RNA, 21 nt, synthetic construct
  source 1..21: mol_type = other RNA
ctgtgctcttcgtcatctgaa

SEQ ID NO: 128 - RNA, 21 nt, synthetic construct
  source 1..21: mol_type = other RNA
tgtgctcttcgtcatctgaca

SEQ ID NO: 129 - RNA, 21 nt, synthetic construct
  source 1..21: mol_type = other RNA
tggactaccagttgtggttaa

SEQ ID NO: 130 - RNA, 21 nt, synthetic construct
  source 1..21: mol_type = other RNA
gactaccagttgtggttaaga

SEQ ID NO: 131 - RNA, 21 nt, synthetic construct
  source 1..21: mol_type = other RNA
tgtggttaagctcttacacca

SEQ ID NO: 132 - RNA, 21 nt, synthetic construct
  source 1..21: mol_type = other RNA
gataaaggctactgttggata

SEQ ID NO: 133 - RNA, 21 nt, synthetic construct
  source 1..21: mol_type = other RNA
ataaaggctactgttggatta

SEQ ID NO: 134 - RNA, 21 nt, synthetic construct
  source 1..21: mol_type = other RNA
ataaaggctactgttggatta

SEQ ID NO: 135 - RNA, 21 nt, synthetic construct
  source 1..21: mol_type = other RNA
aaggctactgttggattgata

SEQ ID NO: 136 - RNA, 21 nt, synthetic construct
  source 1..21: mol_type = other RNA
aaggctactgttggattgata

SEQ ID NO: 137 - RNA, 21 nt, synthetic construct
  source 1..21: mol_type = other RNA
aggctactgttggattgatta

SEQ ID NO: 138 - RNA, 21 nt, synthetic construct
  source 1..21: mol_type = other RNA
ggctactgttggattgattca

SEQ ID NO: 139 - RNA, 21 nt, synthetic construct
  source 1..21: mol_type = other RNA
gctactgttggattgattcga

SEQ ID NO: 140 - RNA, 21 nt, synthetic construct
  source 1..21: mol_type = other RNA
ctactgttggattgattcgaa

SEQ ID NO: 141 - RNA, 21 nt, synthetic construct
  source 1..21: mol_type = other RNA
tactgttggattgattcgaaa

SEQ ID NO: 142 - RNA, 21 nt, synthetic construct
  source 1..21: mol_type = other RNA
actgttggattgattcgaaaa

SEQ ID NO: 143 - RNA, 21 nt, synthetic construct
  source 1..21: mol_type = other RNA
ctgttggattgattcgaaata

SEQ ID NO: 144 - RNA, 21 nt, synthetic construct
  source 1..21: mol_type = other RNA
gttggattgattcgaaatcta

SEQ ID NO: 145 - RNA, 21 nt, synthetic construct
  source 1..21: mol_type = other RNA
gttggattgattcgaaatcta

SEQ ID NO: 146 - RNA, 21 nt, synthetic construct
  source 1..21: mol_type = other RNA
ttggattgattcgaaatctta

SEQ ID NO: 147 - RNA, 21 nt, synthetic construct
  source 1..21: mol_type = other RNA
ggattgattcgaaatcttgca

SEQ ID NO: 148 - RNA, 21 nt, synthetic construct
  source 1..21: mol_type = other RNA
ggattgattcgaaatcttgca

SEQ ID NO: 149 - RNA, 21 nt, synthetic construct
  source 1..21: mol_type = other RNA
ttgattcgaaatcttgcccta

SEQ ID NO: 150 - RNA, 21 nt, synthetic construct
  source 1..21: mol_type = other RNA
attccacgactagttcagtta

SEQ ID NO: 151 - RNA, 21 nt, synthetic construct
  source 1..21: mol_type = other RNA
ccacgactagttcagttgcta

SEQ ID NO: 152 - RNA, 21 nt, synthetic construct
  source 1..21: mol_type = other RNA
ttcagttgcttgttcgtgcaa

SEQ ID NO: 153 - RNA, 21 nt, synthetic construct
  source 1..21: mol_type = other RNA
ggacacagcagcaatttgtga

SEQ ID NO: 154 - RNA, 21 nt, synthetic construct
  source 1..21: mol_type = other RNA
atcctagctcgggatgttcaa

SEQ ID NO: 155 - RNA, 21 nt, synthetic construct
  source 1..21: mol_type = other RNA
agctcgggatgttcacaacca

SEQ ID NO: 156 - RNA, 21 nt, synthetic construct
  source 1..21: mol_type = other RNA
gatgttcacaaccgaattgta

SEQ ID NO: 157 - RNA, 21 nt, synthetic construct
  source 1..21: mol_type = other RNA
tatcagaggactaaataccaa

SEQ ID NO: 158 - RNA, 21 nt, synthetic construct
  source 1..21: mol_type = other RNA
atcagaggactaaataccata

SEQ ID NO: 159 - RNA, 21 nt, synthetic construct
  source 1..21: mol_type = other RNA
tcagaggactaaataccatta

SEQ ID NO: 160 - RNA, 21 nt, synthetic construct
  source 1..21: mol_type = other RNA
gaggactaaataccattccaa

SEQ ID NO: 161 - RNA, 21 nt, synthetic construct
  source 1..21: mol_type = other RNA
gaggactaaataccattccaa

SEQ ID NO: 162 - RNA, 21 nt, synthetic construct
  source 1..21: mol_type = other RNA
ggactaaataccattccatta

SEQ ID NO: 163 - RNA, 21 nt, synthetic construct
  source 1..21: mol_type = other RNA
actaaataccattccattgta

SEQ ID NO: 164 - RNA, 21 nt, synthetic construct
  source 1..21: mol_type = other RNA
ctaaataccattccattgtta

SEQ ID NO: 165 - RNA, 21 nt, synthetic construct
  source 1..21: mol_type = other RNA
taaataccattccattgttta

SEQ ID NO: 166 - RNA, 21 nt, synthetic construct
  source 1..21: mol_type = other RNA
aaataccattccattgtttga

SEQ ID NO: 167 - RNA, 21 nt, synthetic construct
  source 1..21: mol_type = other RNA
aataccattccattgtttgta

SEQ ID NO: 168 - RNA, 21 nt, synthetic construct
  source 1..21: mol_type = other RNA
ataccattccattgtttgtga

SEQ ID NO: 169 - RNA, 21 nt, synthetic construct
  source 1..21: mol_type = other RNA
ataccattccattgtttgtga

SEQ ID NO: 170 - RNA, 21 nt, synthetic construct
  source 1..21: mol_type = other RNA
taccattccattgtttgtgca

SEQ ID NO: 171 - RNA, 21 nt, synthetic construct
  source 1..21: mol_type = other RNA
accattccattgtttgtgcaa

SEQ ID NO: 172 - RNA, 21 nt, synthetic construct
  source 1..21: mol_type = other RNA
accattccattgtttgtgcaa

SEQ ID NO: 173 - RNA, 21 nt, synthetic construct
  source 1..21: mol_type = other RNA
ccattccattgtttgtgcaga

SEQ ID NO: 174 - RNA, 21 nt, synthetic construct
  source 1..21: mol_type = other RNA
cattccattgtttgtgcagca

SEQ ID NO: 175 - RNA, 21 nt, synthetic construct
  source 1..21: mol_type = other RNA
tccattgtttgtgcagctgca

SEQ ID NO: 176 - RNA, 21 nt, synthetic construct
  source 1..21: mol_type = other RNA
gtttgtgcagctgctttatta

SEQ ID NO: 177 - RNA, 21 nt, synthetic construct
  source 1..21: mol_type = other RNA
ctcctctgacagagttactta

SEQ ID NO: 178 - RNA, 21 nt, synthetic construct
  source 1..21: mol_type = other RNA
gacagagttacttcactctaa

SEQ ID NO: 179 - RNA, 21 nt, synthetic construct
  source 1..21: mol_type = other RNA
agttacttcactctaggaata

SEQ ID NO: 180 - RNA, 21 nt, synthetic construct
  source 1..21: mol_type = other RNA
gaggacaagccacaagattaa

SEQ ID NO: 181 - RNA, 21 nt, synthetic construct
  source 1..21: mol_type = other RNA
cacaagattacaagaaacgga

SEQ ID NO: 182 - RNA, 21 nt, synthetic construct
  source 1..21: mol_type = other RNA
acaagattacaagaaacggca

SEQ ID NO: 183 - RNA, 21 nt, synthetic construct
  source 1..21: mol_type = other RNA
caagattacaagaaacggcta

SEQ ID NO: 184 - RNA, 21 nt, synthetic construct
  source 1..21: mol_type = other RNA
aagattacaagaaacggctta

SEQ ID NO: 185 - RNA, 21 nt, synthetic construct
  source 1..21: mol_type = other RNA
ttacaagaaacggctttcaga

SEQ ID NO: 186 - RNA, 21 nt, synthetic construct
  source 1..21: mol_type = other RNA
tacaagaaacggctttcagta

SEQ ID NO: 187 - RNA, 21 nt, synthetic construct
  source 1..21: mol_type = other RNA
aaacggctttcagttgagcta

SEQ ID NO: 188 - RNA, 21 nt, synthetic construct
  source 1..21: mol_type = other RNA
gctttcagttgagctgaccaa

SEQ ID NO: 189 - RNA, 21 nt, synthetic construct
  source 1..21: mol_type = other RNA
cttggacttgatattggtgca

SEQ ID NO: 190 - RNA, 21 nt, synthetic construct
  source 1..21: mol_type = other RNA
tatcgccaggatgatcctaga

SEQ ID NO: 191 - RNA, 21 nt, synthetic construct
  source 1..21: mol_type = other RNA
caccaccctggtgctgactaa

SEQ ID NO: 192 - RNA, 21 nt, synthetic construct
  source 1..21: mol_type = other RNA
atcagctggcctggtttgata

SEQ ID NO: 193 - RNA, 21 nt, synthetic construct
  source 1..21: mol_type = other RNA
tcagctggcctggtttgataa

SEQ ID NO: 194 - RNA, 21 nt, synthetic construct
  source 1..21: mol_type = other RNA
tcagctggcctggtttgataa

SEQ ID NO: 195 - RNA, 21 nt, synthetic construct
  source 1..21: mol_type = other RNA
ctggcctggtttgatactgaa

SEQ ID NO: 196 - RNA, 21 nt, synthetic construct
  source 1..21: mol_type = other RNA
ctgtaaatcatcctttaggta

SEQ ID NO: 197 - RNA, 21 nt, synthetic construct
  source 1..21: mol_type = other RNA
tgtaaatcatcctttaggtaa

SEQ ID NO: 198 - RNA, 21 nt, synthetic construct
  source 1..21: mol_type = other RNA
aaagacttggttggtagggta

SEQ ID NO: 199 - RNA, 21 nt, synthetic construct
  source 1..21: mol_type = other RNA
actttgaaaggagatgtctta

SEQ ID NO: 200 - RNA, 21 nt, synthetic construct
  source 1..21: mol_type = other RNA
actttgaaaggagatgtctta

SEQ ID NO: 201 - RNA, 21 nt, synthetic construct
  source 1..21: mol_type = other RNA
ttctcagatttctggttgtta

SEQ ID NO: 202 - RNA, 21 nt, synthetic construct
  source 1..21: mol_type = other RNA
tctcagatttctggttgttaa

SEQ ID NO: 203 - RNA, 21 nt, synthetic construct
  source 1..21: mol_type = other RNA
tctcagatttctggttgttaa

SEQ ID NO: 204 - RNA, 21 nt, synthetic construct
  source 1..21: mol_type = other RNA
ctcagatttctggttgttata

SEQ ID NO: 205 - RNA, 21 nt, synthetic construct
  source 1..21: mol_type = other RNA
gttgttatgtgatcatgtgta

SEQ ID NO: 206 - RNA, 21 nt, synthetic construct
  source 1..21: mol_type = other RNA
ttgttatgtgatcatgtgtga

SEQ ID NO: 207 - RNA, 21 nt, synthetic construct
  source 1..21: mol_type = other RNA
gtgatcatgtgtggaagttaa

SEQ ID NO: 208 - RNA, 21 nt, synthetic construct
  source 1..21: mol_type = other RNA
gatcatgtgtggaagttatta

SEQ ID NO: 209 - RNA, 21 nt, synthetic construct
  source 1..21: mol_type = other RNA
atcatgtgtggaagttattaa

SEQ ID NO: 210 - RNA, 21 nt, synthetic construct
  source 1..21: mol_type = other RNA
tgcaacttaatactcaaatga

SEQ ID NO: 211 - RNA, 21 nt, synthetic construct
  source 1..21: mol_type = other RNA
cctttctctctttatacagca

SEQ ID NO: 212 - RNA, 21 nt, synthetic construct
  source 1..21: mol_type = other RNA
tttatacagctgtattgtcta

SEQ ID NO: 213 - RNA, 21 nt, synthetic construct
  source 1..21: mol_type = other RNA
tttatacagctgtattgtcta

SEQ ID NO: 214 - RNA, 21 nt, synthetic construct
  source 1..21: mol_type = other RNA
attgtctgaacttgcattgta

SEQ ID NO: 215 - RNA, 21 nt, synthetic construct
  source 1..21: mol_type = other RNA
ttggcctgtagagttgctgaa

SEQ ID NO: 216 - RNA, 21 nt, synthetic construct
  source 1..21: mol_type = other RNA
agtgcctgacacactaaccaa

SEQ ID NO: 217 - RNA, 21 nt, synthetic construct
  source 1..21: mol_type = other RNA
ctgacacactaaccaagctga

SEQ ID NO: 218 - RNA, 21 nt, synthetic construct
  source 1..21: mol_type = other RNA
taaccaagctgagtttcctaa

SEQ ID NO: 219 - RNA, 21 nt, synthetic construct
  source 1..21: mol_type = other RNA
agctgagtttcctatgggaaa

SEQ ID NO: 220 - RNA, 21 nt, synthetic construct
  source 1..21: mol_type = other RNA
tttcctatgggaacaattgaa

SEQ ID NO: 221 - RNA, 21 nt, synthetic construct
  source 1..21: mol_type = other RNA
gtcgaggagtaacaatacaaa

SEQ ID NO: 222 - RNA, 21 nt, synthetic construct
  source 1..21: mol_type = other RNA
gtcgaggagtaacaatacaaa

SEQ ID NO: 223 - RNA, 21 nt, synthetic construct
  source 1..21: mol_type = other RNA
atcaaaccctagccttgctta

SEQ ID NO: 224 - RNA, 21 nt, synthetic construct
  source 1..21: mol_type = other RNA
tttgcttgctttgaagtagca

SEQ ID NO: 225 - RNA, 21 nt, synthetic construct
  source 1..21: mol_type = other RNA
tgcttgctttgaagtagctca

SEQ ID NO: 226 - RNA, 21 nt, synthetic construct
  source 1..21: mol_type = other RNA
gcttgctttgaagtagctcta

SEQ ID NO: 227 - RNA, 21 nt, synthetic construct
  source 1..21: mol_type = other RNA
aagtctctcgtagtgttaaga

SEQ ID NO: 228 - RNA, 21 nt, synthetic construct
  source 1..21: mol_type = other RNA
tctctcgtagtgttaagttaa

SEQ ID NO: 229 - RNA, 21 nt, synthetic construct
  source 1..21: mol_type = other RNA
ctctcgtagtgttaagttata

SEQ ID NO: 230 - RNA, 21 nt, synthetic construct
  source 1..21: mol_type = other RNA
ctctcgtagtgttaagttata

SEQ ID NO: 231 - RNA, 21 nt, synthetic construct
  source 1..21: mol_type = other RNA
ctcgtagtgttaagttataga

SEQ ID NO: 232 - RNA, 21 nt, synthetic construct
  source 1..21: mol_type = other RNA
cgtagtgttaagttatagtga

SEQ ID NO: 233 - RNA, 21 nt, synthetic construct
  source 1..21: mol_type = other RNA
tagtgttaagttatagtgaaa

SEQ ID NO: 234 - RNA, 21 nt, synthetic construct
  source 1..21: mol_type = other RNA
gtgaatactgctacagcaata

SEQ ID NO: 235 - RNA, 21 nt, synthetic construct
  source 1..21: mol_type = other RNA
ctgctacagcaatttctaata

SEQ ID NO: 236 - RNA, 21 nt, synthetic construct
  source 1..21: mol_type = other RNA
gaattgagtaatggtgtagaa

SEQ ID NO: 237 - RNA, 21 nt, synthetic construct
  source 1..21: mol_type = other RNA
ttgagtaatggtgtagaacaa

SEQ ID NO: 238 - RNA, 21 nt, synthetic construct
  source 1..21: mol_type = other RNA
gagtaatggtgtagaacacta

SEQ ID NO: 239 - RNA, 21 nt, synthetic construct
  source 1..21: mol_type = other RNA
agtaatggtgtagaacactaa

SEQ ID NO: 240 - RNA, 21 nt, synthetic construct
  source 1..21: mol_type = other RNA
taatggtgtagaacactaata

SEQ ID NO: 241 - RNA, 21 nt, synthetic construct
  source 1..21: mol_type = other RNA
atggtgtagaacactaattca

SEQ ID NO: 242 - RNA, 21 nt, synthetic construct
  source 1..21: mol_type = other RNA
tggtgtagaacactaattcaa

SEQ ID NO: 243 - RNA, 21 nt, synthetic construct
  source 1..21: mol_type = other RNA
ggtgtagaacactaattcata

SEQ ID NO: 244 - RNA, 21 nt, synthetic construct
  source 1..21: mol_type = other RNA
gtgtagaacactaattcataa

SEQ ID NO: 245 - RNA, 21 nt, synthetic construct
  source 1..21: mol_type = other RNA
tgtagaacactaattcataaa

SEQ ID NO: 246 - RNA, 21 nt, synthetic construct
  source 1..21: mol_type = other RNA
gtagaacactaattcataata

SEQ ID NO: 247 - RNA, 21 nt, synthetic construct
  source 1..21: mol_type = other RNA
tagaacactaattcataatca

SEQ ID NO: 248 - RNA, 21 nt, synthetic construct
  source 1..21: mol_type = other RNA
agaacactaattcataatcaa

SEQ ID NO: 249 - RNA, 21 nt, synthetic construct
  source 1..21: mol_type = other RNA
agaacactaattcataatcaa

SEQ ID NO: 250 - RNA, 21 nt, synthetic construct
  source 1..21: mol_type = other RNA
gaacactaattcataatcaca

SEQ ID NO: 251 - RNA, 21 nt, synthetic construct
  source 1..21: mol_type = other RNA
aacactaattcataatcacta

SEQ ID NO: 252 - RNA, 21 nt, synthetic construct
  source 1..21: mol_type = other RNA
atggtccaattagtttcctta

SEQ ID NO: 253 - RNA, 21 nt, synthetic construct
  source 1..21: mol_type = other RNA
tttgggatatgtatgggtaga

SEQ ID NO: 254 - RNA, 21 nt, synthetic construct
  source 1..21: mol_type = other RNA
tgtatgggtagggtaaatcaa

SEQ ID NO: 255 - RNA, 21 nt, synthetic construct
  source 1..21: mol_type = other RNA
atgggtagggtaaatcagtaa

SEQ ID NO: 256 - RNA, 21 nt, synthetic construct
  source 1..21: mol_type = other RNA
gtagggtaaatcagtaagaga

SEQ ID NO: 257 - RNA, 21 nt, synthetic construct
  source 1..21: mol_type = other RNA
agggtaaatcagtaagaggta

SEQ ID NO: 258 - RNA, 21 nt, synthetic construct
  source 1..21: mol_type = other RNA
gggtaaatcagtaagaggtga

SEQ ID NO: 259 - RNA, 21 nt, synthetic construct
  source 1..21: mol_type = other RNA
gtaaatcagtaagaggtgtta

SEQ ID NO: 260 - RNA, 21 nt, synthetic construct
  source 1..21: mol_type = other RNA
aaatcagtaagaggtgttata

SEQ ID NO: 261 - RNA, 21 nt, synthetic construct
  source 1..21: mol_type = other RNA
aatcagtaagaggtgttatta

SEQ ID NO: 262 - RNA, 21 nt, synthetic construct
  source 1..21: mol_type = other RNA
cagtaagaggtgttatttgga

SEQ ID NO: 263 - RNA, 21 nt, synthetic construct
  source 1..21: mol_type = other RNA
ttggacatggccatggaacca

SEQ ID NO: 264 - RNA, 21 nt, synthetic construct
  source 1..21: mol_type = other RNA
tggactctggaatccattcta

SEQ ID NO: 265 - RNA, 21 nt, synthetic construct
  source 1..21: mol_type = other RNA
ctctgagtggtaaaggcaata

SEQ ID NO: 266 - RNA, 21 nt, synthetic construct
  source 1..21: mol_type = other RNA
tcaagaacaagtagctgataa

SEQ ID NO: 267 - RNA, 21 nt, synthetic construct
  source 1..21: mol_type = other RNA
tagctgatattgatggacaga

SEQ ID NO: 268 - RNA, 21 nt, synthetic construct
  source 1..21: mol_type = other RNA
agctgatattgatggacagta

SEQ ID NO: 269 - RNA, 21 nt, synthetic construct
  source 1..21: mol_type = other RNA
ctgatattgatggacagtata

SEQ ID NO: 270 - RNA, 21 nt, synthetic construct
  source 1..21: mol_type = other RNA
tgatggacagtatgcaatgaa

SEQ ID NO: 271 - RNA, 21 nt, synthetic construct
  source 1..21: mol_type = other RNA
agtatgcaatgactcgagcta

SEQ ID NO: 272 - RNA, 21 nt, synthetic construct
  source 1..21: mol_type = other RNA
agctcagagggtacgagctga

SEQ ID NO: 273 - RNA, 21 nt, synthetic construct
  source 1..21: mol_type = other RNA
ctcagagggtacgagctgcta

SEQ ID NO: 274 - RNA, 21 nt, synthetic construct
  source 1..21: mol_type = other RNA
agagggtacgagctgctatga

SEQ ID NO: 275 - RNA, 21 nt, synthetic construct
  source 1..21: mol_type = other RNA
gctatgttccctgagacatta

SEQ ID NO: 276 - RNA, 21 nt, synthetic construct
  source 1..21: mol_type = other RNA
agcgtttggctgaaccatcaa

SEQ ID NO: 277 - RNA, 21 nt, synthetic construct
  source 1..21: mol_type = other RNA
tgctgaaacatgcagttgtaa

SEQ ID NO: 278 - RNA, 21 nt, synthetic construct
  source 1..21: mol_type = other RNA
catgcagttgtaaacttgata

SEQ ID NO: 279 - RNA, 21 nt, synthetic construct
  source 1..21: mol_type = other RNA
gcagttgtaaacttgattaaa

SEQ ID NO: 280 - RNA, 21 nt, synthetic construct
  source 1..21: mol_type = other RNA
tgattaactatcaagatgata

SEQ ID NO: 281 - RNA, 21 nt, synthetic construct
  source 1..21: mol_type = other RNA
cagaacttgccacacgtgcaa

SEQ ID NO: 282 - RNA, 21 nt, synthetic construct
  source 1..21: mol_type = other RNA
cacacgtgcaatccctgaaca

SEQ ID NO: 283 - RNA, 21 nt, synthetic construct
  source 1..21: mol_type = other RNA
gtgcaatccctgaactgacaa

SEQ ID NO: 284 - RNA, 21 nt, synthetic construct
  source 1..21: mol_type = other RNA
gaggaccaggtggtggttaaa

SEQ ID NO: 285 - RNA, 21 nt, synthetic construct
  source 1..21: mol_type = other RNA
gtggtggttaataaggctgca

SEQ ID NO: 286 - RNA, 21 nt, synthetic construct
  source 1..21: mol_type = other RNA
tgcagaatacaaatgatgtaa

SEQ ID NO: 287 - RNA, 21 nt, synthetic construct
  source 1..21: mol_type = other RNA
agaatacaaatgatgtagaaa

SEQ ID NO: 288 - RNA, 21 nt, synthetic construct
  source 1..21: mol_type = other RNA
tgatgtagaaacagctcgtta

SEQ ID NO: 289 - RNA, 21 nt, synthetic construct
  source 1..21: mol_type = other RNA
cttgcataacctttcccatca

SEQ ID NO: 290 - RNA, 21 nt, synthetic construct
  source 1..21: mol_type = other RNA
ttgcataacctttcccatcaa

SEQ ID NO: 291 - RNA, 21 nt, synthetic construct
  source 1..21: mol_type = other RNA
ccatctttaagtctggaggca

SEQ ID NO: 292 - RNA, 21 nt, synthetic construct
  source 1..21: mol_type = other RNA
gccattacaactctccacaaa

SEQ ID NO: 293 - RNA, 21 nt, synthetic construct
  source 1..21: mol_type = other RNA
gttgccttgctcaacaaaaca

SEQ ID NO: 294 - RNA, 21 nt, synthetic construct
  source 1..21: mol_type = other RNA
attcttggctattacgacaga

SEQ ID NO: 295 - RNA, 21 nt, synthetic construct
  source 1..21: mol_type = other RNA
aaatataatgaggacctataa

SEQ ID NO: 296 - RNA, 21 nt, synthetic construct
  source 1..21: mol_type = other RNA
aatataatgaggacctataca

SEQ ID NO: 297 - RNA, 21 nt, synthetic construct
  source 1..21: mol_type = other RNA
gcagagtgctgaaggtgctaa

SEQ ID NO: 298 - RNA, 21 nt, synthetic construct
  source 1..21: mol_type = other RNA
ttctgggttcagatgatataa

SEQ ID NO: 299 - RNA, 21 nt, synthetic construct
  source 1..21: mol_type = other RNA
gatgatataaatgtggtcaca

SEQ ID NO: 300 - RNA, 21 nt, synthetic construct
  source 1..21: mol_type = other RNA
ggaattctttctaacctcaca

SEQ ID NO: 301 - RNA, 21 nt, synthetic construct
  source 1..21: mol_type = other RNA
tctttctaacctcacttgcaa

SEQ ID NO: 302 - RNA, 21 nt, synthetic construct
  source 1..21: mol_type = other RNA
ttctaacctcacttgcaataa

SEQ ID NO: 303 - RNA, 21 nt, synthetic construct
  source 1..21: mol_type = other RNA
tctaacctcacttgcaataaa

SEQ ID NO: 304 - RNA, 21 nt, synthetic construct
  source 1..21: mol_type = other RNA
aagtgggtggtatagaggcta

SEQ ID NO: 305 - RNA, 21 nt, synthetic construct
  source 1..21: mol_type = other RNA
tgggtggtatagaggctctta

SEQ ID NO: 306 - RNA, 21 nt, synthetic construct
  source 1..21: mol_type = other RNA
agcctgccatctgtgctctta

SEQ ID NO: 307 - RNA, 21 nt, synthetic construct
  source 1..21: mol_type = other RNA
gcctgccatctgtgctcttca

SEQ ID NO: 308 - RNA, 21 nt, synthetic construct
  source 1..21: mol_type = other RNA
catctgtgctcttcgtcatca

SEQ ID NO: 309 - RNA, 21 nt, synthetic construct
  source 1..21: mol_type = other RNA
gctcttcgtcatctgaccaga

SEQ ID NO: 310 - RNA, 21 nt, synthetic construct
  source 1..21: mol_type = other RNA
atgcagttcgccttcactata

SEQ ID NO: 311 - RNA, 21 nt, synthetic construct
  source 1..21: mol_type = other RNA
tggttaagctcttacacccaa

SEQ ID NO: 312 - RNA, 21 nt, synthetic construct
  source 1..21: mol_type = other RNA
ctgttggattgattcgaaata

SEQ ID NO: 313 - RNA, 21 nt, synthetic construct
  source 1..21: mol_type = other RNA
tgttggattgattcgaaatca

SEQ ID NO: 314 - RNA, 21 nt, synthetic construct
  source 1..21: mol_type = other RNA
cgtgagcagggtgccattcca

SEQ ID NO: 315 - RNA, 21 nt, synthetic construct
  source 1..21: mol_type = other RNA
ccacgactagttcagttgcta

SEQ ID NO: 316 - RNA, 21 nt, synthetic construct
  source 1..21: mol_type = other RNA
ttcagttgcttgttcgtgcaa

SEQ ID NO: 317 - RNA, 21 nt, synthetic construct
  source 1..21: mol_type = other RNA
tcagttgcttgttcgtgcaca

SEQ ID NO: 318 - RNA, 21 nt, synthetic construct
  source 1..21: mol_type = other RNA
agttgcttgttcgtgcacata

SEQ ID NO: 319 - RNA, 21 nt, synthetic construct
  source 1..21: mol_type = other RNA
cagaggactaaataccattca

SEQ ID NO: 320 - RNA, 21 nt, synthetic construct
  source 1..21: mol_type = other RNA
gactaaataccattccattga

SEQ ID NO: 321 - RNA, 21 nt, synthetic construct
  source 1..21: mol_type = other RNA
ccattccattgtttgtgcaga

SEQ ID NO: 322 - RNA, 21 nt, synthetic construct
  source 1..21: mol_type = other RNA
attccattgtttgtgcagcta

SEQ ID NO: 323 - RNA, 21 nt, synthetic construct
  source 1..21: mol_type = other RNA
ttccattgtttgtgcagctga

SEQ ID NO: 324 - RNA, 21 nt, synthetic construct
  source 1..21: mol_type = other RNA
ccattgtttgtgcagctgcta

SEQ ID NO: 325 - RNA, 21 nt, synthetic construct
  source 1..21: mol_type = other RNA
gccacagctcctctgacagaa

SEQ ID NO: 326 - RNA, 21 nt, synthetic construct
  source 1..21: mol_type = other RNA
aagccacaagattacaagaaa

SEQ ID NO: 327 - RNA, 21 nt, synthetic construct
  source 1..21: mol_type = other RNA
ccacaagattacaagaaacga

SEQ ID NO: 328 - RNA, 21 nt, synthetic construct
  source 1..21: mol_type = other RNA
aagattacaagaaacggctta

SEQ ID NO: 329 - RNA, 21 nt, synthetic construct
  source 1..21: mol_type = other RNA
attacaagaaacggctttcaa

SEQ ID NO: 330 - RNA, 21 nt, synthetic construct
  source 1..21: mol_type = other RNA
ggctttcagttgagctgacca

SEQ ID NO: 331 - RNA, 21 nt, synthetic construct
  source 1..21: mol_type = other RNA
tgagctgaccagctctctcta

SEQ ID NO: 332 - RNA, 21 nt, synthetic construct
  source 1..21: mol_type = other RNA
gagccaatggcttggaatgaa

SEQ ID NO: 333 - RNA, 21 nt, synthetic construct
  source 1..21: mol_type = other RNA
ctgatcttggacttgatatta

SEQ ID NO: 334 - RNA, 21 nt, synthetic construct
  source 1..21: mol_type = other RNA
tggtttgatactgacctgtaa

SEQ ID NO: 335 - RNA, 21 nt, synthetic construct
  source 1..21: mol_type = other RNA
tttgatactgacctgtaaata

SEQ ID NO: 336 - RNA, 21 nt, synthetic construct
  source 1..21: mol_type = other RNA
ggctatttgtaaatctgccaa

SEQ ID NO: 337 - RNA, 21 nt, synthetic construct
  source 1..21: mol_type = other RNA
tttctggttgttatgtgatca

SEQ ID NO: 338 - RNA, 21 nt, synthetic construct
  source 1..21: mol_type = other RNA
gatcatgtgtggaagttatta

SEQ ID NO: 339 - RNA, 21 nt, synthetic construct
  source 1..21: mol_type = other RNA
taatactcaaatgagtaacaa

SEQ ID NO: 340 - RNA, 21 nt, synthetic construct
  source 1..21: mol_type = other RNA
attgtctgaacttgcattgta

SEQ ID NO: 341 - RNA, 21 nt, synthetic construct
  source 1..21: mol_type = other RNA
cagaaagtgcctgacacacta

SEQ ID NO: 342 - RNA, 21 nt, synthetic construct
  source 1..21: mol_type = other RNA
gaaagtgcctgacacactaaa

SEQ ID NO: 343 - RNA, 21 nt, synthetic construct
  source 1..21: mol_type = other RNA
gcctgacacactaaccaagca

SEQ ID NO: 344 - RNA, 21 nt, synthetic construct
  source 1..21: mol_type = other RNA
tgggaacaattgaagtaaaca

SEQ ID NO: 345 - RNA, 21 nt, synthetic construct
  source 1..21: mol_type = other RNA
atggatcacaagatggaatta

SEQ ID NO: 346 - RNA, 21 nt, synthetic construct
  source 1..21: mol_type = other RNA
tttatcaaaccctagccttga

SEQ ID NO: 347 - RNA, 21 nt, synthetic construct
  source 1..21: mol_type = other RNA
tatctgtaatggtactgacta

SEQ ID NO: 348 - RNA, 21 nt, synthetic construct
  source 1..21: mol_type = other RNA
ttgcttgctttgaagtagcta

SEQ ID NO: 349 - RNA, 21 nt, synthetic construct
  source 1..21: mol_type = other RNA
agtgttaagttatagtgaata

SEQ ID NO: 350 - RNA, 21 nt, synthetic construct
  source 1..21: mol_type = other RNA
tgttaagttatagtgaataca

SEQ ID NO: 351 - RNA, 21 nt, synthetic construct
  source 1..21: mol_type = other RNA
gtaatggtgtagaacactaaa

SEQ ID NO: 352 - RNA, 21 nt, synthetic construct
  source 1..21: mol_type = other RNA
aatggtgtagaacactaatta

SEQ ID NO: 353 - RNA, 21 nt, synthetic construct
  source 1..21: mol_type = other RNA
ctaattcataatcactctaaa

SEQ ID NO: 354 - RNA, 21 nt, synthetic construct
  source 1..21: mol_type = other RNA
tttgggatatgtatgggtaga

SEQ ID NO: 355 - RNA, 21 nt, synthetic construct
  source 1..21: mol_type = other RNA
gggtaaatcagtaagaggtga

SEQ ID NO: 356 - RNA, 21 nt, synthetic construct
  source 1..21: mol_type = other RNA
gtaaatcagtaagaggtgtta

SEQ ID NO: 357 - RNA, 21 nt, synthetic construct
  source 1..21: mol_type = other RNA
taaatcagtaagaggtgttaa

SEQ ID NO: 358 - RNA, 21 nt, synthetic construct
  source 1..21: mol_type = other RNA
aatcagtaagaggtgttatta

SEQ ID NO: 359 - RNA, 23 nt, synthetic construct
  source 1..23: mol_type = other RNA
tggtatacttcaaataccctcag

SEQ ID NO: 360 - RNA, 23 nt, synthetic construct
  source 1..23: mol_type = other RNA
tggtatacttcaaataccctcag

SEQ ID NO: 361 - RNA, 23 nt, synthetic construct
  source 1..23: mol_type = other RNA
tatggtatacttcaaataccctc

SEQ ID NO: 362 - RNA, 23 nt, synthetic construct
  source 1..23: mol_type = other RNA
  modified_base 7: mod_base = OTHER; note = 5'-methyluridine-3'-phosphate
ttatggtatacttcaaataccct

SEQ ID NO: 363 - RNA, 23 nt, synthetic construct
  source 1..23: mol_type = other RNA
tgttgtatggtatacttcaaata

SEQ ID NO: 364 - RNA, 23 nt, synthetic construct
  source 1..23: mol_type = other RNA
  modified_base 5: mod_base = OTHER; note = 5'-methyluridine-3'-phosphate
  modified_base 7: mod_base = OTHER; note = 5'-methyluridine-3'-phosphate
tagttgtatggtatacttcaaat

SEQ ID NO: 365 - RNA, 23 nt, synthetic construct
  source 1..23: mol_type = other RNA
  modified_base 5: mod_base = OTHER; note = 5'-methyluridine-3'-phosphate
tgcttgagtagccattgtccacg

SEQ ID NO: 366 - RNA, 23 nt, synthetic construct
  source 1..23: mol_type = other RNA
  modified_base 7: mod_base = OTHER; note = 5'-methyluridine-3'-phosphate
tcagcttgagtagccattgtcca

SEQ ID NO: 367 - RNA, 23 nt, synthetic construct
  source 1..23: mol_type = other RNA
  modified_base 7: mod_base = OTHER; note = 5'-methyluridine-3'-phosphate
ttcagcttgagtagccattgtcc

SEQ ID NO: 368 - RNA, 23 nt, synthetic construct
  source 1..23: mol_type = other RNA
tcaactccatcaaatcagcttga

SEQ ID NO: 369 - RNA, 23 nt, synthetic construct
  source 1..23: mol_type = other RNA
  modified_base 7: mod_base = OTHER; note = 5'-methyluridine-3'-phosphate
tccaactccatcaaatcagcttg

SEQ ID NO: 370 - RNA, 23 nt, synthetic construct
  source 1..23: mol_type = other RNA
  modified_base 5: mod_base = OTHER; note = 5'-methyluridine-3'-phosphate
  modified_base 12: mod_base = OTHER; note = 5'-methyluridine-3'-phosphate
tcctttaccactcagagaaggag

SEQ ID NO: 371 - RNA, 23 nt, synthetic construct
  source 1..23: mol_type = other RNA
  modified_base 5: mod_base = OTHER; note = 5'-methyluridine-3'-phosphate
  modified_base 7: mod_base = OTHER; note = 5'-methyluridine-3'-phosphate
ttgttcttgagtgaaggactgag

SEQ ID NO: 372 - RNA, 23 nt, synthetic construct
  source 1..23: mol_type = other RNA
  modified_base 7: mod_base = OTHER; note = 5'-methyluridine-3'-phosphate
  modified_base 12: mod_base = OTHER; note = 5'-methyluridine-3'-phosphate
tctacttgttcttgagtgaagga

SEQ ID NO: 373 - RNA, 23 nt, synthetic construct
  source 1..23: mol_type = other RNA
  modified_base 12: mod_base = OTHER; note = 5'-methyluridine-3'-phosphate
tcagctacttgttcttgagtgaa

SEQ ID NO: 374 - RNA, 23 nt, synthetic construct
  source 1..23: mol_type = other RNA
ttgtccatcaatatcagctactt

SEQ ID NO: 375 - RNA, 23 nt, synthetic construct
  source 1..23: mol_type = other RNA
tattgcatactgtccatcaatat

SEQ ID NO: 376 - RNA, 23 nt, synthetic construct
  source 1..23: mol_type = other RNA
  modified_base 5: mod_base = OTHER; note = 5'-methyluridine-3'-phosphate
tagctcgagtcattgcatactgt

SEQ ID NO: 377 - RNA, 23 nt, synthetic construct
  source 1..23: mol_type = other RNA
tggaacatagcagctcgtaccct

SEQ ID NO: 378 - RNA, 23 nt, synthetic construct
  source 1..23: mol_type = other RNA
tcagggaacatagcagctcgtac

SEQ ID NO: 379 - RNA, 23 nt, synthetic construct
  source 1..23: mol_type = other RNA
  modified_base 5: mod_base = OTHER; note = 5'-methyluridine-3'-phosphate
  modified_base 12: mod_base = OTHER; note = 5'-methyluridine-3'-phosphate
tatctaatgtctcagggaacata

SEQ ID NO: 380 - RNA, 23 nt, synthetic construct
  source 1..23: mol_type = other RNA
  modified_base 5: mod_base = OTHER; note = 5'-methyluridine-3'-phosphate
  modified_base 7: mod_base = OTHER; note = 5'-methyluridine-3'-phosphate
ttcatctaatgtctcagggaaca

SEQ ID NO: 381 - RNA, 23 nt, synthetic construct
  source 1..23: mol_type = other RNA
  modified_base 5: mod_base = OTHER; note = 5'-methyluridine-3'-phosphate
  modified_base 7: mod_base = OTHER; note = 5'-methyluridine-3'-phosphate
tggatctgcatgccctcatctaa

SEQ ID NO: 382 - RNA, 23 nt, synthetic construct
  source 1..23: mol_type = other RNA
  modified_base 7: mod_base = OTHER; note = 5'-methyluridine-3'-phosphate
tgacattagtgggatgagcagca

SEQ ID NO: 383 - RNA, 23 nt, synthetic construct
  source 1..23: mol_type = other RNA
  modified_base 5: mod_base = OTHER; note = 5'-methyluridine-3'-phosphate
tgtttcagcatctgtgatggttc

SEQ ID NO: 384 - RNA, 23 nt, synthetic construct
  source 1..23: mol_type = other RNA
  modified_base 5: mod_base = OTHER; note = 5'-methyluridine-3'-phosphate
  modified_base 7: mod_base = OTHER; note = 5'-methyluridine-3'-phosphate
tatgtttcagcatctgtgatggt

SEQ ID NO: 385 - RNA, 23 nt, synthetic construct
  source 1..23: mol_type = other RNA
  modified_base 5: mod_base = OTHER; note = 5'-methyluridine-3'-phosphate
  modified_base 7: mod_base = OTHER; note = 5'-methyluridine-3'-phosphate
tatgtttcagcatctgtgatggt

SEQ ID NO: 386 - RNA, 23 nt, synthetic construct
  source 1..23: mol_type = other RNA
  modified_base 7: mod_base = OTHER; note = 5'-methyluridine-3'-phosphate
tacaactgcatgtttcagcatct

SEQ ID NO: 387 - RNA, 23 nt, synthetic construct
  source 1..23: mol_type = other RNA
  modified_base 7: mod_base = OTHER; note = 5'-methyluridine-3'-phosphate
tacaactgcatgtttcagcatct

SEQ ID NO: 388 - RNA, 23 nt, synthetic construct
  source 1..23: mol_type = other RNA
  modified_base 7: mod_base = OTHER; note = 5'-methyluridine-3'-phosphate
ttcaagtttacaactgcatgttt

SEQ ID NO: 389 - RNA, 23 nt, synthetic construct
  source 1..23: mol_type = other RNA
taatcaagtttacaactgcatgt

SEQ ID NO: 390 - RNA, 23 nt, synthetic construct
  source 1..23: mol_type = other RNA
taatcaagtttacaactgcatgt

SEQ ID NO: 391 - RNA, 23 nt, synthetic construct
  source 1..23: mol_type = other RNA
  modified_base 7: mod_base = OTHER; note = 5'-methyluridine-3'-phosphate
ttcagttcagggattgcacgtgt

SEQ ID NO: 392 - RNA, 23 nt, synthetic construct
  source 1..23: mol_type = other RNA
  modified_base 5: mod_base = OTHER; note = 5'-methyluridine-3'-phosphate
tttgtcagttcagggattgcacg

SEQ ID NO: 393 - RNA, 23 nt, synthetic construct
  source 1..23: mol_type = other RNA
  modified_base 5: mod_base = OTHER; note = 5'-methyluridine-3'-phosphate
tttattaaccaccacctggtcct

SEQ ID NO: 394 - RNA, 23 nt, synthetic construct
  source 1..23: mol_type = other RNA
  modified_base 2: mod_base = OTHER; note = 5'-methyluridine-3'-phosphate
  modified_base 5: mod_base = OTHER; note = 5'-methyluridine-3'-phosphate
tttattaaccaccacctggtcct

SEQ ID NO: 395 - RNA, 23 nt, synthetic construct
  source 1..23: mol_type = other RNA
  modified_base 5: mod_base = OTHER; note = 5'-methyluridine-3'-phosphate
  modified_base 7: mod_base = OTHER; note = 5'-methyluridine-3'-phosphate
tccttattaaccaccacctggtc

SEQ ID NO: 396 - RNA, 23 nt, synthetic construct
  source 1..23: mol_type = other RNA
  modified_base 7: mod_base = OTHER; note = 5'-methyluridine-3'-phosphate
tataactgcagccttattaacca

SEQ ID NO: 397 - RNA, 23 nt, synthetic construct
  source 1..23: mol_type = other RNA
tatagcagacaccatctgaggag

SEQ ID NO: 398 - RNA, 23 nt, synthetic construct
  source 1..23: mol_type = other RNA
  modified_base 5: mod_base = OTHER; note = 5'-methyluridine-3'-phosphate
tcaatagcagacaccatctgagg

SEQ ID NO: 399 - RNA, 23 nt, synthetic construct
  source 1..23: mol_type = other RNA
  modified_base 7: mod_base = OTHER; note = 5'-methyluridine-3'-phosphate
ttacaatagcagacaccatctga

SEQ ID NO: 400 - RNA, 23 nt, synthetic construct
  source 1..23: mol_type = other RNA
  modified_base 2: mod_base = OTHER; note = 5'-methyluridine-3'-phosphate
  modified_base 7: mod_base = OTHER; note = 5'-methyluridine-3'-phosphate
ttacaatagcagacaccatctga

SEQ ID NO: 401 - RNA, 23 nt, synthetic construct
  source 1..23: mol_type = other RNA
  modified_base 5: mod_base = OTHER; note = 5'-methyluridine-3'-phosphate
  modified_base 7: mod_base = OTHER; note = 5'-methyluridine-3'-phosphate
tttgtattctgcatggtacgtac

SEQ ID NO: 402 - RNA, 23 nt, synthetic construct
  source 1..23: mol_type = other RNA
  modified_base 2: mod_base = OTHER; note = 5'-methyluridine-3'-phosphate
  modified_base 5: mod_base = OTHER; note = 5'-methyluridine-3'-phosphate
  modified_base 7: mod_base = OTHER; note = 5'-methyluridine-3'-phosphate
tttgtattctgcatggtacgtac

SEQ ID NO: 403 - RNA, 23 nt, synthetic construct
  source 1..23: mol_type = other RNA
ttttgtattctgcatggtacgta

SEQ ID NO: 404 - RNA, 23 nt, synthetic construct
  source 1..23: mol_type = other RNA
  modified_base 5: mod_base = OTHER; note = 5'-methyluridine-3'-phosphate
  modified_base 7: mod_base = OTHER; note = 5'-methyluridine-3'-phosphate
tatttgtattctgcatggtacgt

SEQ ID NO: 405 - RNA, 23 nt, synthetic construct
  source 1..23: mol_type = other RNA
  modified_base 5: mod_base = OTHER; note = 5'-methyluridine-3'-phosphate
tcatttgtattctgcatggtacg

SEQ ID NO: 406 - RNA, 23 nt, synthetic construct
  source 1..23: mol_type = other RNA
  modified_base 2: mod_base = OTHER; note = 5'-methyluridine-3'-phosphate
  modified_base 5: mod_base = OTHER; note = 5'-methyluridine-3'-phosphate
  modified_base 7: mod_base = OTHER; note = 5'-methyluridine-3'-phosphate
  modified_base 12: mod_base = OTHER; note = 5'-methyluridine-3'-phosphate
ttcatttgtattctgcatggtac

SEQ ID NO: 407 - RNA, 23 nt, synthetic construct
  source 1..23: mol_type = other RNA
  modified_base 7: mod_base = OTHER; note = 5'-methyluridine-3'-phosphate
  modified_base 12: mod_base = OTHER; note = 5'-methyluridine-3'-phosphate
tatcatttgtattctgcatggta

SEQ ID NO: 408 - RNA, 23 nt, synthetic construct
  source 1..23: mol_type = other RNA
  modified_base 7: mod_base = OTHER; note = 5'-methyluridine-3'-phosphate
tcatcatttgtattctgcatggt

SEQ ID NO: 409 - RNA, 23 nt, synthetic construct
  source 1..23: mol_type = other RNA
  modified_base 5: mod_base = OTHER; note = 5'-methyluridine-3'-phosphate
tacatcatttgtattctgcatgg

SEQ ID NO: 410 - RNA, 23 nt, synthetic construct
  source 1..23: mol_type = other RNA
  modified_base 7: mod_base = OTHER; note = 5'-methyluridine-3'-phosphate
  modified_base 12: mod_base = OTHER; note = 5'-methyluridine-3'-phosphate
tctacatcatttgtattctgcat

SEQ ID NO: 411 - RNA, 23 nt, synthetic construct
  source 1..23: mol_type = other RNA
ttctacatcatttgtattctgca

SEQ ID NO: 412 - RNA, 23 nt, synthetic construct
  source 1..23: mol_type = other RNA
  modified_base 12: mod_base = OTHER; note = 5'-methyluridine-3'-phosphate
taacgagctgtttctacatcatt

SEQ ID NO: 413 - RNA, 23 nt, synthetic construct
  source 1..23: mol_type = other RNA
  modified_base 12: mod_base = OTHER; note = 5'-methyluridine-3'-phosphate
tcaacgagctgtttctacatcat

SEQ ID NO: 414 - RNA, 23 nt, synthetic construct
  source 1..23: mol_type = other RNA
  modified_base 7: mod_base = OTHER; note = 5'-methyluridine-3'-phosphate
tcagacttaaagatggccagtaa

SEQ ID NO: 415 - RNA, 23 nt, synthetic construct
  source 1..23: mol_type = other RNA
tccagacttaaagatggccagta

SEQ ID NO: 416 - RNA, 23 nt, synthetic construct
  source 1..23: mol_type = other RNA
ttccagacttaaagatggccagt

SEQ ID NO: 417 - RNA, 23 nt, synthetic construct
  source 1..23: mol_type = other RNA
tctccagacttaaagatggccag

SEQ ID NO: 418 - RNA, 23 nt, synthetic construct
  source 1..23: mol_type = other RNA
  modified_base 12: mod_base = OTHER; note = 5'-methyluridine-3'-phosphate
tcctccagacttaaagatggcca

SEQ ID NO: 419 - RNA, 23 nt, synthetic construct
  source 1..23: mol_type = other RNA
  modified_base 7: mod_base = OTHER; note = 5'-methyluridine-3'-phosphate
  modified_base 12: mod_base = OTHER; note = 5'-methyluridine-3'-phosphate
tcagaatccactggtgaaccaag

SEQ ID NO: 420 - RNA, 23 nt, synthetic construct
  source 1..23: mol_type = other RNA
tacaacacagaatccactggtga

SEQ ID NO: 421 - RNA, 23 nt, synthetic construct
  source 1..23: mol_type = other RNA
  modified_base 7: mod_base = OTHER; note = 5'-methyluridine-3'-phosphate
tccagctaaacgcactgccattt

SEQ ID NO: 422 - RNA, 23 nt, synthetic construct
  source 1..23: mol_type = other RNA
  modified_base 7: mod_base = OTHER; note = 5'-methyluridine-3'-phosphate
tccagctaaacgcactgccattt

SEQ ID NO: 423 - RNA, 23 nt, synthetic construct
  source 1..23: mol_type = other RNA
  modified_base 5: mod_base = OTHER; note = 5'-methyluridine-3'-phosphate
  modified_base 7: mod_base = OTHER; note = 5'-methyluridine-3'-phosphate
ttgttttgttgagcaaggcaacc

SEQ ID NO: 424 - RNA, 23 nt, synthetic construct
  source 1..23: mol_type = other RNA
  modified_base 2: mod_base = OTHER; note = 5'-methyluridine-3'-phosphate
  modified_base 5: mod_base = OTHER; note = 5'-methyluridine-3'-phosphate
  modified_base 7: mod_base = OTHER; note = 5'-methyluridine-3'-phosphate
tttgttttgttgagcaaggcaac

SEQ ID NO: 425 - RNA, 23 nt, synthetic construct
  source 1..23: mol_type = other RNA
  modified_base 5: mod_base = OTHER; note = 5'-methyluridine-3'-phosphate
  modified_base 7: mod_base = OTHER; note = 5'-methyluridine-3'-phosphate
tttgttttgttgagcaaggcaac

SEQ ID NO: 426 - RNA, 23 nt, synthetic construct
  source 1..23: mol_type = other RNA
  modified_base 7: mod_base = OTHER; note = 5'-methyluridine-3'-phosphate
ttttgttttgttgagcaaggcaa

SEQ ID NO: 427 - RNA, 23 nt, synthetic construct
  source 1..23: mol_type = other RNA
  modified_base 7: mod_base = OTHER; note = 5'-methyluridine-3'-phosphate
tcgtaatagccaagaatttaaca

SEQ ID NO: 428 - RNA, 23 nt, synthetic construct
  source 1..23: mol_type = other RNA
  modified_base 5: mod_base = OTHER; note = 5'-methyluridine-3'-phosphate
tctgtcgtaatagccaagaattt

SEQ ID NO: 429 - RNA, 23 nt, synthetic construct
  source 1..23: mol_type = other RNA
  modified_base 7: mod_base = OTHER; note = 5'-methyluridine-3'-phosphate
tggcagtctgtcgtaatagccaa

SEQ ID NO: 430 - RNA, 23 nt, synthetic construct
  source 1..23: mol_type = other RNA
ttttgaaggcagtctgtcgtaat

SEQ ID NO: 431 - RNA, 23 nt, synthetic construct
  source 1..23: mol_type = other RNA
  modified_base 7: mod_base = OTHER; note = 5'-methyluridine-3'-phosphate
  modified_base 12: mod_base = OTHER; note = 5'-methyluridine-3'-phosphate
tcctcattatatttactaaagct

SEQ ID NO: 432 - RNA, 23 nt, synthetic construct
  source 1..23: mol_type = other RNA
  modified_base 5: mod_base = OTHER; note = 5'-methyluridine-3'-phosphate
  modified_base 7: mod_base = OTHER; note = 5'-methyluridine-3'-phosphate
taagtataggtcctcattatatt

SEQ ID NO: 433 - RNA, 23 nt, synthetic construct
  source 1..23: mol_type = other RNA
  modified_base 7: mod_base = OTHER; note = 5'-methyluridine-3'-phosphate
taagcttgcattccaccagcttc

SEQ ID NO: 434 - RNA, 23 nt, synthetic construct
  source 1..23: mol_type = other RNA
taagacgttgacttggatctgtc

SEQ ID NO: 435 - RNA, 23 nt, synthetic construct
  source 1..23: mol_type = other RNA
ttgaacaagacgttgacttggat

SEQ ID NO: 436 - RNA, 23 nt, synthetic construct
  source 1..23: mol_type = other RNA
  modified_base 2: mod_base = OTHER; note = 5'-methyluridine-3'-phosphate
ttgaacaagacgttgacttggat

SEQ ID NO: 437 - RNA, 23 nt, synthetic construct
  source 1..23: mol_type = other RNA
  modified_base 7: mod_base = OTHER; note = 5'-methyluridine-3'-phosphate
tgagagtccaaagacagttctga

SEQ ID NO: 438 - RNA, 23 nt, synthetic construct
  source 1..23: mol_type = other RNA
  modified_base 7: mod_base = OTHER; note = 5'-methyluridine-3'-phosphate
tttagttgcagcatctgaaagat

SEQ ID NO: 439 - RNA, 23 nt, synthetic construct
  source 1..23: mol_type = other RNA
  modified_base 5: mod_base = OTHER; note = 5'-methyluridine-3'-phosphate
ttgtttagttgcagcatctgaaa

SEQ ID NO: 440 - RNA, 23 nt, synthetic construct
  source 1..23: mol_type = other RNA
  modified_base 5: mod_base = OTHER; note = 5'-methyluridine-3'-phosphate
  modified_base 7: mod_base = OTHER; note = 5'-methyluridine-3'-phosphate
ttcctgtttagttgcagcatctg

SEQ ID NO: 441 - RNA, 23 nt, synthetic construct
  source 1..23: mol_type = other RNA
  modified_base 5: mod_base = OTHER; note = 5'-methyluridine-3'-phosphate
  modified_base 12: mod_base = OTHER; note = 5'-methyluridine-3'-phosphate
tcccttcctgtttagttgcagca

SEQ ID NO: 442 - RNA, 23 nt, synthetic construct
  source 1..23: mol_type = other RNA
taggagaccttccatcccttcct

SEQ ID NO: 443 - RNA, 23 nt, synthetic construct
  source 1..23: mol_type = other RNA
  modified_base 5: mod_base = OTHER; note = 5'-methyluridine-3'-phosphate
tatatcatctgaacccagaagct

SEQ ID NO: 444 - RNA, 23 nt, synthetic construct
  source 1..23: mol_type = other RNA
  modified_base 7: mod_base = OTHER; note = 5'-methyluridine-3'-phosphate
taagaattccagctgcacaggtg

SEQ ID NO: 445 - RNA, 23 nt, synthetic construct
  source 1..23: mol_type = other RNA
tgaaagaattccagctgcacagg

SEQ ID NO: 446 - RNA, 23 nt, synthetic construct
  source 1..23: mol_type = other RNA
  modified_base 5: mod_base = OTHER; note = 5'-methyluridine-3'-phosphate
taagtgaggttagaaagaattcc

SEQ ID NO: 447 - RNA, 23 nt, synthetic construct
  source 1..23: mol_type = other RNA
  modified_base 7: mod_base = OTHER; note = 5'-methyluridine-3'-phosphate
  modified_base 12: mod_base = OTHER; note = 5'-methyluridine-3'-phosphate
tgcaagtgaggttagaaagaatt

SEQ ID NO: 448 - RNA, 23 nt, synthetic construct
  source 1..23: mol_type = other RNA
tttgcaagtgaggttagaaagaa

SEQ ID NO: 449 - RNA, 23 nt, synthetic construct
  source 1..23: mol_type = other RNA
tattgcaagtgaggttagaaaga

SEQ ID NO: 450 - RNA, 23 nt, synthetic construct
  source 1..23: mol_type = other RNA
  modified_base 7: mod_base = OTHER; note = 5'-methyluridine-3'-phosphate
tattattgcaagtgaggttagaa

SEQ ID NO: 451 - RNA, 23 nt, synthetic construct
  source 1..23: mol_type = other RNA
  modified_base 5: mod_base = OTHER; note = 5'-methyluridine-3'-phosphate
  modified_base 7: mod_base = OTHER; note = 5'-methyluridine-3'-phosphate
taattattgcaagtgaggttaga

SEQ ID NO: 452 - RNA, 23 nt, synthetic construct
  source 1..23: mol_type = other RNA
  modified_base 2: mod_base = OTHER; note = 5'-methyluridine-3'-phosphate
  modified_base 5: mod_base = OTHER; note = 5'-methyluridine-3'-phosphate
ttaattattgcaagtgaggttag

SEQ ID NO: 453 - RNA, 23 nt, synthetic construct
  source 1..23: mol_type = other RNA
  modified_base 7: mod_base = OTHER; note = 5'-methyluridine-3'-phosphate
tataattattgcaagtgaggtta

SEQ ID NO: 454 - RNA, 23 nt, synthetic construct
  source 1..23: mol_type = other RNA
  modified_base 2: mod_base = OTHER; note = 5'-methyluridine-3'-phosphate
  modified_base 7: mod_base = OTHER; note = 5'-methyluridine-3'-phosphate
ttataattattgcaagtgaggtt

SEQ ID NO: 455 - RNA, 23 nt, synthetic construct
  source 1..23: mol_type = other RNA
  modified_base 5: mod_base = OTHER; note = 5'-methyluridine-3'-phosphate
tttataattattgcaagtgaggt

SEQ ID NO: 456 - RNA, 23 nt, synthetic construct
  source 1..23: mol_type = other RNA
  modified_base 2: mod_base = OTHER; note = 5'-methyluridine-3'-phosphate
  modified_base 5: mod_base = OTHER; note = 5'-methyluridine-3'-phosphate
  modified_base 12: mod_base = OTHER; note = 5'-methyluridine-3'-phosphate
tttataattattgcaagtgaggt

SEQ ID NO: 457 - RNA, 23 nt, synthetic construct
  source 1..23: mol_type = other RNA
  modified_base 12: mod_base = OTHER; note = 5'-methyluridine-3'-phosphate
tcttataattattgcaagtgagg

SEQ ID NO: 458 - RNA, 23 nt, synthetic construct
  source 1..23: mol_type = other RNA
  modified_base 2: mod_base = OTHER; note = 5'-methyluridine-3'-phosphate
  modified_base 5: mod_base = OTHER; note = 5'-methyluridine-3'-phosphate
  modified_base 7: mod_base = OTHER; note = 5'-methyluridine-3'-phosphate
ttcttataattattgcaagtgag

SEQ ID NO: 459 - RNA, 23 nt, synthetic construct
  source 1..23: mol_type = other RNA
  modified_base 5: mod_base = OTHER; note = 5'-methyluridine-3'-phosphate
  modified_base 7: mod_base = OTHER; note = 5'-methyluridine-3'-phosphate
tgcctctataccacccacttggc

SEQ ID NO: 460 - RNA, 23 nt, synthetic construct
  source 1..23: mol_type = other RNA
taggacagtacgcacaagagcct

SEQ ID NO: 461 - RNA, 23 nt, synthetic construct
  source 1..23: mol_type = other RNA
tcgaagagcacagatggcaggct

SEQ ID NO: 462 - RNA, 23 nt, synthetic construct
  source 1..23: mol_type = other RNA
tacgaagagcacagatggcaggc

SEQ ID NO: 463 - RNA, 23 nt, synthetic construct
  source 1..23: mol_type = other RNA
tgacgaagagcacagatggcagg

SEQ ID NO: 464 - RNA, 23 nt, synthetic construct
  source 1..23: mol_type = other RNA
  modified_base 2: mod_base = OTHER; note = 5'-methyluridine-3'-phosphate
ttgacgaagagcacagatggcag

SEQ ID NO: 465 - RNA, 23 nt, synthetic construct
  source 1..23: mol_type = other RNA
tatgacgaagagcacagatggca

SEQ ID NO: 466 - RNA, 23 nt, synthetic construct
  source 1..23: mol_type = other RNA
  modified_base 5: mod_base = OTHER; note = 5'-methyluridine-3'-phosphate
tagatgacgaagagcacagatgg

SEQ ID NO: 467 - RNA, 23 nt, synthetic construct
  source 1..23: mol_type = other RNA
tcagatgacgaagagcacagatg

SEQ ID NO: 468 - RNA, 23 nt, synthetic construct
  source 1..23: mol_type = other RNA
  modified_base 7: mod_base = OTHER; note = 5'-methyluridine-3'-phosphate
ttcagatgacgaagagcacagat

SEQ ID NO: 469 - RNA, 23 nt, synthetic construct
  source 1..23: mol_type = other RNA
tgtcagatgacgaagagcacaga

SEQ ID NO: 470 - RNA, 23 nt, synthetic construct
  source 1..23: mol_type = other RNA
ttaaccacaactggtagtccata

SEQ ID NO: 471 - RNA, 23 nt, synthetic construct
  source 1..23: mol_type = other RNA
tcttaaccacaactggtagtcca

SEQ ID NO: 472 - RNA, 23 nt, synthetic construct
  source 1..23: mol_type = other RNA
tggtgtaagagcttaaccacaac

SEQ ID NO: 473 - RNA, 23 nt, synthetic construct
  source 1..23: mol_type = other RNA
tatccaacagtagcctttatcag

SEQ ID NO: 474 - RNA, 23 nt, synthetic construct
  source 1..23: mol_type = other RNA
taatccaacagtagcctttatca

SEQ ID NO: 475 - RNA, 23 nt, synthetic construct
  source 1..23: mol_type = other RNA
  modified_base 12: mod_base = OTHER; note = 5'-methyluridine-3'-phosphate
taatccaacagtagcctttatca

SEQ ID NO: 476 - RNA, 23 nt, synthetic construct
  source 1..23: mol_type = other RNA
  modified_base 7: mod_base = OTHER; note = 5'-methyluridine-3'-phosphate
tatcaatccaacagtagccttta

SEQ ID NO: 477 - RNA, 23 nt, synthetic construct
  source 1..23: mol_type = other RNA
  modified_base 7: mod_base = OTHER; note = 5'-methyluridine-3'-phosphate
tatcaatccaacagtagccttta

SEQ ID NO: 478 - RNA, 23 nt, synthetic construct
  source 1..23: mol_type = other RNA
taatcaatccaacagtagccttt

SEQ ID NO: 479 - RNA, 23 nt, synthetic construct
  source 1..23: mol_type = other RNA
  modified_base 5: mod_base = OTHER; note = 5'-methyluridine-3'-phosphate
tgaatcaatccaacagtagcctt

SEQ ID NO: 480 - RNA, 23 nt, synthetic construct
  source 1..23: mol_type = other RNA
tcgaatcaatccaacagtagcct

SEQ ID NO: 481 - RNA, 23 nt, synthetic construct
  source 1..23: mol_type = other RNA
  modified_base 2: mod_base = OTHER; note = 5'-methyluridine-3'-phosphate
  modified_base 7: mod_base = OTHER; note = 5'-methyluridine-3'-phosphate
ttcgaatcaatccaacagtagcc

SEQ ID NO: 482 - RNA, 23 nt, synthetic construct
  source 1..23: mol_type = other RNA
  modified_base 2: mod_base = OTHER; note = 5'-methyluridine-3'-phosphate
  modified_base 12: mod_base = OTHER; note = 5'-methyluridine-3'-phosphate
tttcgaatcaatccaacagtagc

SEQ ID NO: 483 - RNA, 23 nt, synthetic construct
  source 1..23: mol_type = other RNA
  modified_base 2: mod_base = OTHER; note = 5'-methyluridine-3'-phosphate
ttttcgaatcaatccaacagtag

SEQ ID NO: 484 - RNA, 23 nt, synthetic construct
  source 1..23: mol_type = other RNA
  modified_base 5: mod_base = OTHER; note = 5'-methyluridine-3'-phosphate
tatttcgaatcaatccaacagta

SEQ ID NO: 485 - RNA, 23 nt, synthetic construct
  source 1..23: mol_type = other RNA
  modified_base 5: mod_base = OTHER; note = 5'-methyluridine-3'-phosphate
  modified_base 7: mod_base = OTHER; note = 5'-methyluridine-3'-phosphate
  modified_base 12: mod_base = OTHER; note = 5'-methyluridine-3'-phosphate
tagatttcgaatcaatccaacag

SEQ ID NO: 486 - RNA, 23 nt, synthetic construct
  source 1..23: mol_type = other RNA
  modified_base 5: mod_base = OTHER; note = 5'-methyluridine-3'-phosphate
  modified_base 7: mod_base = OTHER; note = 5'-methyluridine-3'-phosphate
tagatttcgaatcaatccaacag

SEQ ID NO: 487 - RNA, 23 nt, synthetic construct
  source 1..23: mol_type = other RNA
  modified_base 7: mod_base = OTHER; note = 5'-methyluridine-3'-phosphate
taagatttcgaatcaatccaaca

SEQ ID NO: 488 - RNA, 23 nt, synthetic construct
  source 1..23: mol_type = other RNA
tgcaagatttcgaatcaatccaa

SEQ ID NO: 489 - RNA, 23 nt, synthetic construct
  source 1..23: mol_type = other RNA
tgcaagatttcgaatcaatccaa

SEQ ID NO: 490 - RNA, 23 nt, synthetic construct
  source 1..23: mol_type = other RNA
tagggcaagatttcgaatcaatc

SEQ ID NO: 491 - RNA, 23 nt, synthetic construct
  source 1..23: mol_type = other RNA
  modified_base 5: mod_base = OTHER; note = 5'-methyluridine-3'-phosphate
taactgaactagtcgtggaatgg

SEQ ID NO: 492 - RNA, 23 nt, synthetic construct
  source 1..23: mol_type = other RNA
tagcaactgaactagtcgtggaa

SEQ ID NO: 493 - RNA, 23 nt, synthetic construct
  source 1..23: mol_type = other RNA
  modified_base 2: mod_base = OTHER; note = 5'-methyluridine-3'-phosphate
ttgcacgaacaagcaactgaact

SEQ ID NO: 494 - RNA, 23 nt, synthetic construct
  source 1..23: mol_type = other RNA
  modified_base 12: mod_base = OTHER; note = 5'-methyluridine-3'-phosphate
tcacaaattgctgctgtgtccca

SEQ ID NO: 495 - RNA, 23 nt, synthetic construct
  source 1..23: mol_type = other RNA
ttgaacatcccgagctaggatgt

SEQ ID NO: 496 - RNA, 23 nt, synthetic construct
  source 1..23: mol_type = other RNA
  modified_base 5: mod_base = OTHER; note = 5'-methyluridine-3'-phosphate
  modified_base 7: mod_base = OTHER; note = 5'-methyluridine-3'-phosphate
tggttgtgaacatcccgagctag

SEQ ID NO: 497 - RNA, 23 nt, synthetic construct
  source 1..23: mol_type = other RNA
  modified_base 7: mod_base = OTHER; note = 5'-methyluridine-3'-phosphate
  modified_base 12: mod_base = OTHER; note = 5'-methyluridine-3'-phosphate
tacaattcggttgtgaacatccc

SEQ ID NO: 498 - RNA, 23 nt, synthetic construct
  source 1..23: mol_type = other RNA
  modified_base 5: mod_base = OTHER; note = 5'-methyluridine-3'-phosphate
  modified_base 7: mod_base = OTHER; note = 5'-methyluridine-3'-phosphate
ttggtatttagtcctctgataac

SEQ ID NO: 499 - RNA, 23 nt, synthetic construct
  source 1..23: mol_type = other RNA
tatggtatttagtcctctgataa

SEQ ID NO: 500 - RNA, 23 nt, synthetic construct
  source 1..23: mol_type = other RNA
  modified_base 7: mod_base = OTHER; note = 5'-methyluridine-3'-phosphate
taatggtatttagtcctctgata

SEQ ID NO: 501 - RNA, 23 nt, synthetic construct
  source 1..23: mol_type = other RNA
  modified_base 7: mod_base = OTHER; note = 5'-methyluridine-3'-phosphate
ttggaatggtatttagtcctctg

SEQ ID NO: 502 - RNA, 23 nt, synthetic construct
  source 1..23: mol_type = other RNA
  modified_base 2: mod_base = OTHER; note = 5'-methyluridine-3'-phosphate
  modified_base 7: mod_base = OTHER; note = 5'-methyluridine-3'-phosphate
  modified_base 12: mod_base = OTHER; note = 5'-methyluridine-3'-phosphate
ttggaatggtatttagtcctctg

SEQ ID NO: 503 - RNA, 23 nt, synthetic construct
  source 1..23: mol_type = other RNA
  modified_base 12: mod_base = OTHER; note = 5'-methyluridine-3'-phosphate
taatggaatggtatttagtcctc

SEQ ID NO: 504 - RNA, 23 nt, synthetic construct
  source 1..23: mol_type = other RNA
tacaatggaatggtatttagtcc

SEQ ID NO: 505 - RNA, 23 nt, synthetic construct
  source 1..23: mol_type = other RNA
  modified_base 7: mod_base = OTHER; note = 5'-methyluridine-3'-phosphate
  modified_base 12: mod_base = OTHER; note = 5'-methyluridine-3'-phosphate
taacaatggaatggtatttagtc

SEQ ID NO: 506 - RNA, 23 nt, synthetic construct
  source 1..23: mol_type = other RNA
taaacaatggaatggtatttagt

SEQ ID NO: 507 - RNA, 23 nt, synthetic construct
  source 1..23: mol_type = other RNA
tcaaacaatggaatggtatttag

SEQ ID NO: 508 - RNA, 23 nt, synthetic construct
  source 1..23: mol_type = other RNA
tacaaacaatggaatggtattta

SEQ ID NO: 509 - RNA, 23 nt, synthetic construct
  source 1..23: mol_type = other RNA
tcacaaacaatggaatggtattt

SEQ ID NO: 510 - RNA, 23 nt, synthetic construct
  source 1..23: mol_type = other RNA
tcacaaacaatggaatggtattt

SEQ ID NO: 511 - RNA, 23 nt, synthetic construct
  source 1..23: mol_type = other RNA
  modified_base 12: mod_base = OTHER; note = 5'-methyluridine-3'-phosphate
tgcacaaacaatggaatggtatt

SEQ ID NO: 512 - RNA, 23 nt, synthetic construct
  source 1..23: mol_type = other RNA
  modified_base 2: mod_base = OTHER; note = 5'-methyluridine-3'-phosphate
ttgcacaaacaatggaatggtat

SEQ ID NO: 513 - RNA, 23 nt, synthetic construct
  source 1..23: mol_type = other RNA
ttgcacaaacaatggaatggtat

SEQ ID NO: 514 - RNA, 23 nt, synthetic construct
  source 1..23: mol_type = other RNA
tctgcacaaacaatggaatggta

SEQ ID NO: 515 - RNA, 23 nt, synthetic construct
  source 1..23: mol_type = other RNA
tgctgcacaaacaatggaatggt

SEQ ID NO: 516 - RNA, 23 nt, synthetic construct
  source 1..23: mol_type = other RNA
  modified_base 7: mod_base = OTHER; note = 5'-methyluridine-3'-phosphate
tgcagctgcacaaacaatggaat

SEQ ID NO: 517 - RNA, 23 nt, synthetic construct
  source 1..23: mol_type = other RNA
taataaagcagctgcacaaacaa

SEQ ID NO: 518 - RNA, 23 nt, synthetic construct
  source 1..23: mol_type = other RNA
  modified_base 5: mod_base = OTHER; note = 5'-methyluridine-3'-phosphate
taagtaactctgtcagaggagct

SEQ ID NO: 519 - RNA, 23 nt, synthetic construct
  source 1..23: mol_type = other RNA
  modified_base 7: mod_base = OTHER; note = 5'-methyluridine-3'-phosphate
ttagagtgaagtaactctgtcag

SEQ ID NO: 520 - RNA, 23 nt, synthetic construct
  source 1..23: mol_type = other RNA
  modified_base 7: mod_base = OTHER; note = 5'-methyluridine-3'-phosphate
tattcctagagtgaagtaactct

SEQ ID NO: 521 - RNA, 23 nt, synthetic construct
  source 1..23: mol_type = other RNA
  modified_base 5: mod_base = OTHER; note = 5'-methyluridine-3'-phosphate
  modified_base 7: mod_base = OTHER; note = 5'-methyluridine-3'-phosphate
ttaatcttgtggcttgtcctcag

SEQ ID NO: 522 - RNA, 23 nt, synthetic construct
  source 1..23: mol_type = other RNA
  modified_base 5: mod_base = OTHER; note = 5'-methyluridine-3'-phosphate
  modified_base 7: mod_base = OTHER; note = 5'-methyluridine-3'-phosphate
  modified_base 12: mod_base = OTHER; note = 5'-methyluridine-3'-phosphate
tccgtttcttgtaatcttgtggc

SEQ ID NO: 523 - RNA, 23 nt, synthetic construct
  source 1..23: mol_type = other RNA
  modified_base 7: mod_base = OTHER; note = 5'-methyluridine-3'-phosphate
tgccgtttcttgtaatcttgtgg

SEQ ID NO: 524 - RNA, 23 nt, synthetic construct
  source 1..23: mol_type = other RNA
  modified_base 7: mod_base = OTHER; note = 5'-methyluridine-3'-phosphate
  modified_base 12: mod_base = OTHER; note = 5'-methyluridine-3'-phosphate
tagccgtttcttgtaatcttgtg

SEQ ID NO: 525 - RNA, 23 nt, synthetic construct
  source 1..23: mol_type = other RNA
  modified_base 12: mod_base = OTHER; note = 5'-methyluridine-3'-phosphate
taagccgtttcttgtaatcttgt

SEQ ID NO: 526 - RNA, 23 nt, synthetic construct
  source 1..23: mol_type = other RNA
  modified_base 12: mod_base = OTHER; note = 5'-methyluridine-3'-phosphate
tctgaaagccgtttcttgtaatc

SEQ ID NO: 527 - RNA, 23 nt, synthetic construct
  source 1..23: mol_type = other RNA
tactgaaagccgtttcttgtaat

SEQ ID NO: 528 - RNA, 23 nt, synthetic construct
  source 1..23: mol_type = other RNA
  modified_base 5: mod_base = OTHER; note = 5'-methyluridine-3'-phosphate
tagctcaactgaaagccgtttct

SEQ ID NO: 529 - RNA, 23 nt, synthetic construct
  source 1..23: mol_type = other RNA
  modified_base 5: mod_base = OTHER; note = 5'-methyluridine-3'-phosphate
ttggtcagctcaactgaaagccg

SEQ ID NO: 530 - RNA, 23 nt, synthetic construct
  source 1..23: mol_type = other RNA
tgcaccaatatcaagtccaagat

SEQ ID NO: 531 - RNA, 23 nt, synthetic construct
  source 1..23: mol_type = other RNA
tctaggatcatcctggcgatatc

SEQ ID NO: 532 - RNA, 23 nt, synthetic construct
  source 1..23: mol_type = other RNA
  modified_base 5: mod_base = OTHER; note = 5'-methyluridine-3'-phosphate
ttagtcagcaccagggtggtggc

SEQ ID NO: 533 - RNA, 23 nt, synthetic construct
  source 1..23: mol_type = other RNA
tatcaaaccaggccagctgattg

SEQ ID NO: 534 - RNA, 23 nt, synthetic construct
  source 1..23: mol_type = other RNA
ttatcaaaccaggccagctgatt

SEQ ID NO: 535 - RNA, 23 nt, synthetic construct
  source 1..23: mol_type = other RNA
  modified_base 2: mod_base = OTHER; note = 5'-methyluridine-3'-phosphate
ttatcaaaccaggccagctgatt

SEQ ID NO: 536 - RNA, 23 nt, synthetic construct
  source 1..23: mol_type = other RNA
ttcagtatcaaaccaggccagct

SEQ ID NO: 537 - RNA, 23 nt, synthetic construct
  source 1..23: mol_type = other RNA
  modified_base 5: mod_base = OTHER; note = 5'-methyluridine-3'-phosphate
  modified_base 12: mod_base = OTHER; note = 5'-methyluridine-3'-phosphate
tacctaaaggatgatttacaggt

SEQ ID NO: 538 - RNA, 23 nt, synthetic construct
  source 1..23: mol_type = other RNA
  modified_base 2: mod_base = OTHER; note = 5'-methyluridine-3'-phosphate
ttacctaaaggatgatttacagg

SEQ ID NO: 539 - RNA, 23 nt, synthetic construct
  source 1..23: mol_type = other RNA
taccctaccaaccaagtctttct

SEQ ID NO: 540 - RNA, 23 nt, synthetic construct
  source 1..23: mol_type = other RNA
taagacatctcctttcaaagtat

SEQ ID NO: 541 - RNA, 23 nt, synthetic construct
  source 1..23: mol_type = other RNA
taagacatctcctttcaaagtat

SEQ ID NO: 542 - RNA, 23 nt, synthetic construct
  source 1..23: mol_type = other RNA
taacaaccagaaatctgagaaca

SEQ ID NO: 543 - RNA, 23 nt, synthetic construct
  source 1..23: mol_type = other RNA
ttaacaaccagaaatctgagaac

SEQ ID NO: 544 - RNA, 23 nt, synthetic construct
  source 1..23: mol_type = other RNA
  modified_base 2: mod_base = OTHER; note = 5'-methyluridine-3'-phosphate
ttaacaaccagaaatctgagaac

SEQ ID NO: 545 - RNA, 23 nt, synthetic construct
  source 1..23: mol_type = other RNA
tataacaaccagaaatctgagaa

SEQ ID NO: 546 - RNA, 23 nt, synthetic construct
  source 1..23: mol_type = other RNA
  modified_base 7: mod_base = OTHER; note = 5'-methyluridine-3'-phosphate
tacacatgatcacataacaacca

SEQ ID NO: 547 - RNA, 23 nt, synthetic construct
  source 1..23: mol_type = other RNA
tcacacatgatcacataacaacc

SEQ ID NO: 548 - RNA, 23 nt, synthetic construct
  source 1..23: mol_type = other RNA
  modified_base 7: mod_base = OTHER; note = 5'-methyluridine-3'-phosphate
ttaacttccacacatgatcacat

SEQ ID NO: 549 - RNA, 23 nt, synthetic construct
  source 1..23: mol_type = other RNA
taataacttccacacatgatcac

SEQ ID NO: 550 - RNA, 23 nt, synthetic construct
  source 1..23: mol_type = other RNA
  modified_base 2: mod_base = OTHER; note = 5'-methyluridine-3'-phosphate
  modified_base 5: mod_base = OTHER; note = 5'-methyluridine-3'-phosphate
ttaataacttccacacatgatca

SEQ ID NO: 551 - RNA, 23 nt, synthetic construct
  source 1..23: mol_type = other RNA
  modified_base 5: mod_base = OTHER; note = 5'-methyluridine-3'-phosphate
  modified_base 12: mod_base = OTHER; note = 5'-methyluridine-3'-phosphate
tcatttgagtattaagttgcaaa

SEQ ID NO: 552 - RNA, 23 nt, synthetic construct
  source 1..23: mol_type = other RNA
tgctgtataaagagagaaaggct

SEQ ID NO: 553 - RNA, 23 nt, synthetic construct
  source 1..23: mol_type = other RNA
tagacaatacagctgtataaaga

SEQ ID NO: 554 - RNA, 23 nt, synthetic construct
  source 1..23: mol_type = other RNA
tagacaatacagctgtataaaga

SEQ ID NO: 555 - RNA, 23 nt, synthetic construct
  source 1..23: mol_type = other RNA
  modified_base 12: mod_base = OTHER; note = 5'-methyluridine-3'-phosphate
tacaatgcaagttcagacaatac

SEQ ID NO: 556 - RNA, 23 nt, synthetic construct
  source 1..23: mol_type = other RNA
ttcagcaactctacaggccaatc

SEQ ID NO: 557 - RNA, 23 nt, synthetic construct
  source 1..23: mol_type = other RNA
  modified_base 5: mod_base = OTHER; note = 5'-methyluridine-3'-phosphate
ttggttagtgtgtcaggcacttt

SEQ ID NO: 558 - RNA, 23 nt, synthetic construct
  source 1..23: mol_type = other RNA
  modified_base 7: mod_base = OTHER; note = 5'-methyluridine-3'-phosphate
tcagcttggttagtgtgtcaggc

SEQ ID NO: 559 - RNA, 23 nt, synthetic construct
  source 1..23: mol_type = other RNA
  modified_base 2: mod_base = OTHER; note = 5'-methyluridine-3'-phosphate
ttaggaaactcagcttggttagt

SEQ ID NO: 560 - RNA, 23 nt, synthetic construct
  source 1..23: mol_type = other RNA
tttcccataggaaactcagcttg

SEQ ID NO: 561 - RNA, 23 nt, synthetic construct
  source 1..23: mol_type = other RNA
  modified_base 2: mod_base = OTHER; note = 5'-methyluridine-3'-phosphate
  modified_base 7: mod_base = OTHER; note = 5'-methyluridine-3'-phosphate
ttcaattgttcccataggaaact

SEQ ID NO: 562 - RNA, 23 nt, synthetic construct
  source 1..23: mol_type = other RNA
  modified_base 5: mod_base = OTHER; note = 5'-methyluridine-3'-phosphate
  modified_base 7: mod_base = OTHER; note = 5'-methyluridine-3'-phosphate
tttgtattgttactcctcgacca

SEQ ID NO: 563 - RNA, 23 nt, synthetic construct
  source 1..23: mol_type = other RNA
  modified_base 2: mod_base = OTHER; note = 5'-methyluridine-3'-phosphate
  modified_base 5: mod_base = OTHER; note = 5'-methyluridine-3'-phosphate
  modified_base 7: mod_base = OTHER; note = 5'-methyluridine-3'-phosphate
tttgtattgttactcctcgacca

SEQ ID NO: 564 - RNA, 23 nt, synthetic construct
  source 1..23: mol_type = other RNA
taagcaaggctagggtttgataa

SEQ ID NO: 565 - RNA, 23 nt, synthetic construct
  source 1..23: mol_type = other RNA
  modified_base 7: mod_base = OTHER; note = 5'-methyluridine-3'-phosphate
tgctacttcaaagcaagcaaagt

SEQ ID NO: 566 - RNA, 23 nt, synthetic construct
  source 1..23: mol_type = other RNA
tgagctacttcaaagcaagcaaa

SEQ ID NO: 567 - RNA, 23 nt, synthetic construct
  source 1..23: mol_type = other RNA
  modified_base 7: mod_base = OTHER; note = 5'-methyluridine-3'-phosphate
tagagctacttcaaagcaagcaa

SEQ ID NO: 568 - RNA, 23 nt, synthetic construct
  source 1..23: mol_type = other RNA
tcttaacactacgagagacttaa

SEQ ID NO: 569 - RNA, 23 nt, synthetic construct
  source 1..23: mol_type = other RNA
  modified_base 7: mod_base = OTHER; note = 5'-methyluridine-3'-phosphate
ttaacttaacactacgagagact

SEQ ID NO: 570 - RNA, 23 nt, synthetic construct
  source 1..23: mol_type = other RNA
  modified_base 7: mod_base = OTHER; note = 5'-methyluridine-3'-phosphate
tataacttaacactacgagagac

SEQ ID NO: 571 - RNA, 23 nt, synthetic construct
  source 1..23: mol_type = other RNA
  modified_base 7: mod_base = OTHER; note = 5'-methyluridine-3'-phosphate
tataacttaacactacgagagac

SEQ ID NO: 572 - RNA, 23 nt, synthetic construct
  source 1..23: mol_type = other RNA
  modified_base 5: mod_base = OTHER; note = 5'-methyluridine-3'-phosphate
tctataacttaacactacgagag

SEQ ID NO: 573 - RNA, 23 nt, synthetic construct
  source 1..23: mol_type = other RNA
  modified_base 5: mod_base = OTHER; note = 5'-methyluridine-3'-phosphate
  modified_base 7: mod_base = OTHER; note = 5'-methyluridine-3'-phosphate
  modified_base 12: mod_base = OTHER; note = 5'-methyluridine-3'-phosphate
tcactataacttaacactacgag

SEQ ID NO: 574 - RNA, 23 nt, synthetic construct
  source 1..23: mol_type = other RNA
  modified_base 7: mod_base = OTHER; note = 5'-methyluridine-3'-phosphate
tttcactataacttaacactacg

SEQ ID NO: 575 - RNA, 23 nt, synthetic construct
  source 1..23: mol_type = other RNA
  modified_base 7: mod_base = OTHER; note = 5'-methyluridine-3'-phosphate
tattgctgtagcagtattcacta

SEQ ID NO: 576 - RNA, 23 nt, synthetic construct
  source 1..23: mol_type = other RNA
tattagaaattgctgtagcagta

SEQ ID NO: 577 - RNA, 23 nt, synthetic construct
  source 1..23: mol_type = other RNA
ttctacaccattactcaattctt

SEQ ID NO: 578 - RNA, 23 nt, synthetic construct
  source 1..23: mol_type = other RNA
  modified_base 5: mod_base = OTHER; note = 5'-methyluridine-3'-phosphate
  modified_base 7: mod_base = OTHER; note = 5'-methyluridine-3'-phosphate
ttgttctacaccattactcaatt

SEQ ID NO: 579 - RNA, 23 nt, synthetic construct
  source 1..23: mol_type = other RNA
  modified_base 7: mod_base = OTHER; note = 5'-methyluridine-3'-phosphate
tagtgttctacaccattactcaa

SEQ ID NO: 580 - RNA, 23 nt, synthetic construct
  source 1..23: mol_type = other RNA
  modified_base 5: mod_base = OTHER; note = 5'-methyluridine-3'-phosphate
  modified_base 7: mod_base = OTHER; note = 5'-methyluridine-3'-phosphate
ttagtgttctacaccattactca

SEQ ID NO: 581 - RNA, 23 nt, synthetic construct
  source 1..23: mol_type = other RNA
  modified_base 7: mod_base = OTHER; note = 5'-methyluridine-3'-phosphate
tattagtgttctacaccattact

SEQ ID NO: 582 - RNA, 23 nt, synthetic construct
  source 1..23: mol_type = other RNA
  modified_base 5: mod_base = OTHER; note = 5'-methyluridine-3'-phosphate
  modified_base 12: mod_base = OTHER; note = 5'-methyluridine-3'-phosphate
tgaattagtgttctacaccatta

SEQ ID NO: 583 - RNA, 23 nt, synthetic construct
  source 1..23: mol_type = other RNA
  modified_base 2: mod_base = OTHER; note = 5'-methyluridine-3'-phosphate
  modified_base 7: mod_base = OTHER; note = 5'-methyluridine-3'-phosphate
  modified_base 12: mod_base = OTHER; note = 5'-methyluridine-3'-phosphate
ttgaattagtgttctacaccatt

SEQ ID NO: 584 - RNA, 23 nt, synthetic construct
  source 1..23: mol_type = other RNA
  modified_base 7: mod_base = OTHER; note = 5'-methyluridine-3'-phosphate
tatgaattagtgttctacaccat

SEQ ID NO: 585 - RNA, 23 nt, synthetic construct
  source 1..23: mol_type = other RNA
ttatgaattagtgttctacacca

SEQ ID NO: 586 - RNA, 23 nt, synthetic construct
  source 1..23: mol_type = other RNA
  modified_base 5: mod_base = OTHER; note = 5'-methyluridine-3'-phosphate
tttatgaattagtgttctacacc

SEQ ID NO: 587 - RNA, 23 nt, synthetic construct
  source 1..23: mol_type = other RNA
tattatgaattagtgttctacac

SEQ ID NO: 588 - RNA, 23 nt, synthetic construct
  source 1..23: mol_type = other RNA
  modified_base 5: mod_base = OTHER; note = 5'-methyluridine-3'-phosphate
  modified_base 7: mod_base = OTHER; note = 5'-methyluridine-3'-phosphate
  modified_base 12: mod_base = OTHER; note = 5'-methyluridine-3'-phosphate
tgattatgaattagtgttctaca

SEQ ID NO: 589 - RNA, 23 nt, synthetic construct
  source 1..23: mol_type = other RNA
  modified_base 2: mod_base = OTHER; note = 5'-methyluridine-3'-phosphate
  modified_base 5: mod_base = OTHER; note = 5'-methyluridine-3'-phosphate
  modified_base 12: mod_base = OTHER; note = 5'-methyluridine-3'-phosphate
ttgattatgaattagtgttctac

SEQ ID NO: 590 - RNA, 23 nt, synthetic construct
  source 1..23: mol_type = other RNA
  modified_base 5: mod_base = OTHER; note = 5'-methyluridine-3'-phosphate
ttgattatgaattagtgttctac

SEQ ID NO: 591 - RNA, 23 nt, synthetic construct
  source 1..23: mol_type = other RNA
  modified_base 7: mod_base = OTHER; note = 5'-methyluridine-3'-phosphate
tgtgattatgaattagtgttcta

SEQ ID NO: 592 - RNA, 23 nt, synthetic construct
  source 1..23: mol_type = other RNA
  modified_base 7: mod_base = OTHER; note = 5'-methyluridine-3'-phosphate
tagtgattatgaattagtgttct

SEQ ID NO: 593 - RNA, 23 nt, synthetic construct
  source 1..23: mol_type = other RNA
taaggaaactaattggaccattt

SEQ ID NO: 594 - RNA, 23 nt, synthetic construct
  source 1..23: mol_type = other RNA
tctacccatacatatcccaaata

SEQ ID NO: 595 - RNA, 23 nt, synthetic construct
  source 1..23: mol_type = other RNA
  modified_base 5: mod_base = OTHER; note = 5'-methyluridine-3'-phosphate
  modified_base 7: mod_base = OTHER; note = 5'-methyluridine-3'-phosphate
ttgatttaccctacccatacata

SEQ ID NO: 596 - RNA, 23 nt, synthetic construct
  source 1..23: mol_type = other RNA
  modified_base 5: mod_base = OTHER; note = 5'-methyluridine-3'-phosphate
ttactgatttaccctacccatac

SEQ ID NO: 597 - RNA, 23 nt, synthetic construct
  source 1..23: mol_type = other RNA
  modified_base 5: mod_base = OTHER; note = 5'-methyluridine-3'-phosphate
  modified_base 12: mod_base = OTHER; note = 5'-methyluridine-3'-phosphate
tctcttactgatttaccctaccc

SEQ ID NO: 598 - RNA, 23 nt, synthetic construct
  source 1..23: mol_type = other RNA
  modified_base 5: mod_base = OTHER; note = 5'-methyluridine-3'-phosphate
  modified_base 7: mod_base = OTHER; note = 5'-methyluridine-3'-phosphate
tacctcttactgatttaccctac

SEQ ID NO: 599 - RNA, 23 nt, synthetic construct
  source 1..23: mol_type = other RNA
  modified_base 12: mod_base = OTHER; note = 5'-methyluridine-3'-phosphate
tcacctcttactgatttacccta

SEQ ID NO: 600 - RNA, 23 nt, synthetic construct
  source 1..23: mol_type = other RNA
taacacctcttactgatttaccc

SEQ ID NO: 601 - RNA, 23 nt, synthetic construct
  source 1..23: mol_type = other RNA
tataacacctcttactgatttac

SEQ ID NO: 602 - RNA, 23 nt, synthetic construct
  source 1..23: mol_type = other RNA
taataacacctcttactgattta

SEQ ID NO: 603 - RNA, 23 nt, synthetic construct
  source 1..23: mol_type = other RNA
  modified_base 7: mod_base = OTHER; note = 5'-methyluridine-3'-phosphate
tccaaataacacctcttactgat

SEQ ID NO: 604 - RNA, 23 nt, synthetic construct
  source 1..23: mol_type = other RNA
  modified_base 5: mod_base = OTHER; note = 5'-methyluridine-3'-phosphate
tggttccatggccatgtccaact

SEQ ID NO: 605 - RNA, 23 nt, synthetic construct
  source 1..23: mol_type = other RNA
tagaatggattccagagtccagg

SEQ ID NO: 606 - RNA, 23 nt, synthetic construct
  source 1..23: mol_type = other RNA
tattgcctttaccactcagagaa

SEQ ID NO: 607 - RNA, 23 nt, synthetic construct
  source 1..23: mol_type = other RNA
ttatcagctacttgttcttgagt

SEQ ID NO: 608 - RNA, 23 nt, synthetic construct
  source 1..23: mol_type = other RNA
  modified_base 5: mod_base = OTHER; note = 5'-methyluridine-3'-phosphate
tctgtccatcaatatcagctact

SEQ ID NO: 609 - RNA, 23 nt, synthetic construct
  source 1..23: mol_type = other RNA
tactgtccatcaatatcagctac

SEQ ID NO: 610 - RNA, 23 nt, synthetic construct
  source 1..23: mol_type = other RNA
tatactgtccatcaatatcagct

SEQ ID NO: 611 - RNA, 23 nt, synthetic construct
  source 1..23: mol_type = other RNA
  modified_base 5: mod_base = OTHER; note = 5'-methyluridine-3'-phosphate
ttcattgcatactgtccatcaat

SEQ ID NO: 612 - RNA, 23 nt, synthetic construct
  source 1..23: mol_type = other RNA
  modified_base 5: mod_base = OTHER; note = 5'-methyluridine-3'-phosphate
tagctcgagtcattgcatactgt

SEQ ID NO: 613 - RNA, 23 nt, synthetic construct
  source 1..23: mol_type = other RNA
tcagctcgtaccctctgagctcg

SEQ ID NO: 614 - RNA, 23 nt, synthetic construct
  source 1..23: mol_type = other RNA
tagcagctcgtaccctctgagct

SEQ ID NO: 615 - RNA, 23 nt, synthetic construct
  source 1..23: mol_type = other RNA
tcatagcagctcgtaccctctga

SEQ ID NO: 616 - RNA, 23 nt, synthetic construct
  source 1..23: mol_type = other RNA
taatgtctcagggaacatagcag

SEQ ID NO: 617 - RNA, 23 nt, synthetic construct
  source 1..23: mol_type = other RNA
  modified_base 5: mod_base = OTHER; note = 5'-methyluridine-3'-phosphate
ttgatggttcagccaaacgctgg

SEQ ID NO: 618 - RNA, 23 nt, synthetic construct
  source 1..23: mol_type = other RNA
ttacaactgcatgtttcagcatc

SEQ ID NO: 619 - RNA, 23 nt, synthetic construct
  source 1..23: mol_type = other RNA
tatcaagtttacaactgcatgtt

SEQ ID NO: 620 - RNA, 23 nt, synthetic construct
  source 1..23: mol_type = other RNA
tttaatcaagtttacaactgcat

SEQ ID NO: 621 - RNA, 23 nt, synthetic construct
  source 1..23: mol_type = other RNA
tatcatcttgatagttaatcaag

SEQ ID NO: 622 - RNA, 23 nt, synthetic construct
  source 1..23: mol_type = other RNA
ttgcacgtgtggcaagttctgca

SEQ ID NO: 623 - RNA, 23 nt, synthetic construct
  source 1..23: mol_type = other RNA
tgttcagggattgcacgtgtggc

SEQ ID NO: 624 - RNA, 23 nt, synthetic construct
  source 1..23: mol_type = other RNA
ttgtcagttcagggattgcacgt

SEQ ID NO: 625 - RNA, 23 nt, synthetic construct
  source 1..23: mol_type = other RNA
tttaaccaccacctggtcctcgt

SEQ ID NO: 626 - RNA, 23 nt, synthetic construct
  source 1..23: mol_type = other RNA
tgcagccttattaaccaccacct

SEQ ID NO: 627 - RNA, 23 nt, synthetic construct
  source 1..23: mol_type = other RNA
ttacatcatttgtattctgcatg

SEQ ID NO: 628 - RNA, 23 nt, synthetic construct
  source 1..23: mol_type = other RNA
  modified_base 5: mod_base = OTHER; note = 5'-methyluridine-3'-phosphate
tttctacatcatttgtattctgc

SEQ ID NO: 629 - RNA, 23 nt, synthetic construct
  source 1..23: mol_type = other RNA
taacgagctgtttctacatcatt

SEQ ID NO: 630 - RNA, 23 nt, synthetic construct
  source 1..23: mol_type = other RNA
tgatgggaaaggttatgcaaggt

SEQ ID NO: 631 - RNA, 23 nt, synthetic construct
  source 1..23: mol_type = other RNA
  modified_base 5: mod_base = OTHER; note = 5'-methyluridine-3'-phosphate
ttgatgggaaaggttatgcaagg

SEQ ID NO: 632 - RNA, 23 nt, synthetic construct
  source 1..23: mol_type = other RNA
  modified_base 5: mod_base = OTHER; note = 5'-methyluridine-3'-phosphate
tgcctccagacttaaagatggcc

SEQ ID NO: 633 - RNA, 23 nt, synthetic construct
  source 1..23: mol_type = other RNA
  modified_base 5: mod_base = OTHER; note = 5'-methyluridine-3'-phosphate
tttgtggagagttgtaatggcat

SEQ ID NO: 634 - RNA, 23 nt, synthetic construct
  source 1..23: mol_type = other RNA
  modified_base 5: mod_base = OTHER; note = 5'-methyluridine-3'-phosphate
tgttttgttgagcaaggcaacca

SEQ ID NO: 635 - RNA, 23 nt, synthetic construct
  source 1..23: mol_type = other RNA
  modified_base 5: mod_base = OTHER; note = 5'-methyluridine-3'-phosphate
tctgtcgtaatagccaagaattt

SEQ ID NO: 636 - RNA, 23 nt, synthetic construct
  source 1..23: mol_type = other RNA
ttataggtcctcattatatttac

SEQ ID NO: 637 - RNA, 23 nt, synthetic construct
  source 1..23: mol_type = other RNA
  modified_base 5: mod_base = OTHER; note = 5'-methyluridine-3'-phosphate
tgtataggtcctcattatattta

SEQ ID NO: 638 - RNA, 23 nt, synthetic construct
  source 1..23: mol_type = other RNA
ttagcaccttcagcactctgctt

SEQ ID NO: 639 - RNA, 23 nt, synthetic construct
  source 1..23: mol_type = other RNA
ttatatcatctgaacccagaagc

SEQ ID NO: 640 - RNA, 23 nt, synthetic construct
  source 1..23: mol_type = other RNA
tgtgaccacatttatatcatctg

SEQ ID NO: 641 - RNA, 23 nt, synthetic construct
  source 1..23: mol_type = other RNA
tgtgaggttagaaagaattccag

SEQ ID NO: 642 - RNA, 23 nt, synthetic construct
  source 1..23: mol_type = other RNA
ttgcaagtgaggttagaaagaat

SEQ ID NO: 643 - RNA, 23 nt, synthetic construct
  source 1..23: mol_type = other RNA
  modified_base 5: mod_base = OTHER; note = 5'-methyluridine-3'-phosphate
ttattgcaagtgaggttagaaag

SEQ ID NO: 644 - RNA, 23 nt, synthetic construct
  source 1..23: mol_type = other RNA
  modified_base 5: mod_base = OTHER; note = 5'-methyluridine-3'-phosphate
tttattgcaagtgaggttagaaa

SEQ ID NO: 645 - RNA, 23 nt, synthetic construct
  source 1..23: mol_type = other RNA
tagcctctataccacccacttgg

SEQ ID NO: 646 - RNA, 23 nt, synthetic construct
  source 1..23: mol_type = other RNA
taagagcctctataccacccact

SEQ ID NO: 647 - RNA, 23 nt, synthetic construct
  source 1..23: mol_type = other RNA
taagagcacagatggcaggctca

SEQ ID NO: 648 - RNA, 23 nt, synthetic construct
  source 1..23: mol_type = other RNA
tgaagagcacagatggcaggctc

SEQ ID NO: 649 - RNA, 23 nt, synthetic construct
  source 1..23: mol_type = other RNA
tgatgacgaagagcacagatggc

SEQ ID NO: 650 - RNA, 23 nt, synthetic construct
  source 1..23: mol_type = other RNA
tctggtcagatgacgaagagcac

SEQ ID NO: 651 - RNA, 23 nt, synthetic construct
  source 1..23: mol_type = other RNA
tatagtgaaggcgaactgcattc

SEQ ID NO: 652 - RNA, 23 nt, synthetic construct
  source 1..23: mol_type = other RNA
ttgggtgtaagagcttaaccaca

SEQ ID NO: 653 - RNA, 23 nt, synthetic construct
  source 1..23: mol_type = other RNA
  modified_base 5: mod_base = OTHER; note = 5'-methyluridine-3'-phosphate
tatttcgaatcaatccaacagta

SEQ ID NO: 654 - RNA, 23 nt, synthetic construct
  source 1..23: mol_type = other RNA
  modified_base 5: mod_base = OTHER; note = 5'-methyluridine-3'-phosphate
tgatttcgaatcaatccaacagt

SEQ ID NO: 655 - RNA, 23 nt, synthetic construct
  source 1..23: mol_type = other RNA
tggaatggcaccctgctcacgca

SEQ ID NO: 656 - RNA, 23 nt, synthetic construct
  source 1..23: mol_type = other RNA
tagcaactgaactagtcgtggaa

SEQ ID NO: 657 - RNA, 23 nt, synthetic construct
  source 1..23: mol_type = other RNA
ttgcacgaacaagcaactgaact

SEQ ID NO: 658 - RNA, 23 nt, synthetic construct
  source 1..23: mol_type = other RNA
tgtgcacgaacaagcaactgaac

SEQ ID NO: 659 - RNA, 23 nt, synthetic construct
  source 1..23: mol_type = other RNA
  modified_base 5: mod_base = OTHER; note = 5'-methyluridine-3'-phosphate
tatgtgcacgaacaagcaactga

SEQ ID NO: 660 - RNA, 23 nt, synthetic construct
  source 1..23: mol_type = other RNA
  modified_base 5: mod_base = OTHER; note = 5'-methyluridine-3'-phosphate
tgaatggtatttagtcctctgat

SEQ ID NO: 661 - RNA, 23 nt, synthetic construct
  source 1..23: mol_type = other RNA
  modified_base 5: mod_base = OTHER; note = 5'-methyluridine-3'-phosphate
tcaatggaatggtatttagtcct

SEQ ID NO: 662 - RNA, 23 nt, synthetic construct
  source 1..23: mol_type = other RNA
tctgcacaaacaatggaatggta

SEQ ID NO: 663 - RNA, 23 nt, synthetic construct
  source 1..23: mol_type = other RNA
  modified_base 5: mod_base = OTHER; note = 5'-methyluridine-3'-phosphate
tagctgcacaaacaatggaatgg

SEQ ID NO: 664 - RNA, 23 nt, synthetic construct
  source 1..23: mol_type = other RNA
tcagctgcacaaacaatggaatg

SEQ ID NO: 665 - RNA, 23 nt, synthetic construct
  source 1..23: mol_type = other RNA
tagcagctgcacaaacaatggaa

SEQ ID NO: 666 - RNA, 23 nt, synthetic construct
  source 1..23: mol_type = other RNA
ttctgtcagaggagctgtggctc

SEQ ID NO: 667 - RNA, 23 nt, synthetic construct
  source 1..23: mol_type = other RNA
  modified_base 5: mod_base = OTHER; note = 5'-methyluridine-3'-phosphate
tttcttgtaatcttgtggcttgt

SEQ ID NO: 668 - RNA, 23 nt, synthetic construct
  source 1..23: mol_type = other RNA
  modified_base 5: mod_base = OTHER; note = 5'-methyluridine-3'-phosphate
tcgtttcttgtaatcttgtggct

SEQ ID NO: 669 - RNA, 23 nt, synthetic construct
  source 1..23: mol_type = other RNA
taagccgtttcttgtaatcttgt

SEQ ID NO: 670 - RNA, 23 nt, synthetic construct
  source 1..23: mol_type = other RNA
ttgaaagccgtttcttgtaatct

SEQ ID NO: 671 - RNA, 23 nt, synthetic construct
  source 1..23: mol_type = other RNA
tggtcagctcaactgaaagccgt

SEQ ID NO: 672 - RNA, 23 nt, synthetic construct
  source 1..23: mol_type = other RNA
tagagagagctggtcagctcaac

SEQ ID NO: 673 - RNA, 23 nt, synthetic construct
  source 1..23: mol_type = other RNA
  modified_base 5: mod_base = OTHER; note = 5'-methyluridine-3'-phosphate
ttcattccaagccattggctctg

SEQ ID NO: 674 - RNA, 23 nt, synthetic construct
  source 1..23: mol_type = other RNA
taatatcaagtccaagatcagca

SEQ ID NO: 675 - RNA, 23 nt, synthetic construct
  source 1..23: mol_type = other RNA
ttacaggtcagtatcaaaccagg

SEQ ID NO: 676 - RNA, 23 nt, synthetic construct
  source 1..23: mol_type = other RNA
  modified_base 5: mod_base = OTHER; note = 5'-methyluridine-3'-phosphate
tatttacaggtcagtatcaaacc

SEQ ID NO: 677 - RNA, 23 nt, synthetic construct
  source 1..23: mol_type = other RNA
ttggcagatttacaaatagccta

SEQ ID NO: 678 - RNA, 23 nt, synthetic construct
  source 1..23: mol_type = other RNA
tgatcacataacaaccagaaatc

SEQ ID NO: 679 - RNA, 23 nt, synthetic construct
  source 1..23: mol_type = other RNA
taataacttccacacatgatcac

SEQ ID NO: 680 - RNA, 23 nt, synthetic construct
  source 1..23: mol_type = other RNA
  modified_base 5: mod_base = OTHER; note = 5'-methyluridine-3'-phosphate
ttgttactcatttgagtattaag

SEQ ID NO: 681 - RNA, 23 nt, synthetic construct
  source 1..23: mol_type = other RNA
tacaatgcaagttcagacaatac

SEQ ID NO: 682 - RNA, 23 nt, synthetic construct
  source 1..23: mol_type = other RNA
tagtgtgtcaggcactttctgag

SEQ ID NO: 683 - RNA, 23 nt, synthetic construct
  source 1..23: mol_type = other RNA
tttagtgtgtcaggcactttctg

SEQ ID NO: 684 - RNA, 23 nt, synthetic construct
  source 1..23: mol_type = other RNA
  modified_base 5: mod_base = OTHER; note = 5'-methyluridine-3'-phosphate
tgcttggttagtgtgtcaggcac

SEQ ID NO: 685 - RNA, 23 nt, synthetic construct
  source 1..23: mol_type = other RNA
  modified_base 5: mod_base = OTHER; note = 5'-methyluridine-3'-phosphate
tgtttacttcaattgttcccata

SEQ ID NO: 686 - RNA, 23 nt, synthetic construct
  source 1..23: mol_type = other RNA
  modified_base 5: mod_base = OTHER; note = 5'-methyluridine-3'-phosphate
taattccatcttgtgatccattc

SEQ ID NO: 687 - RNA, 23 nt, synthetic construct
  source 1..23: mol_type = other RNA
tcaaggctagggtttgataaatt

SEQ ID NO: 688 - RNA, 23 nt, synthetic construct
  source 1..23: mol_type = other RNA
tagtcagtaccattacagatatt

SEQ ID NO: 689 - RNA, 23 nt, synthetic construct
  source 1..23: mol_type = other RNA
  modified_base 5: mod_base = OTHER; note = 5'-methyluridine-3'-phosphate
tagctacttcaaagcaagcaaag

SEQ ID NO: 690 - RNA, 23 nt, synthetic construct
  source 1..23: mol_type = other RNA
tattcactataacttaacactac

SEQ ID NO: 691 - RNA, 23 nt, synthetic construct
  source 1..23: mol_type = other RNA
  modified_base 5: mod_base = OTHER; note = 5'-methyluridine-3'-phosphate
tgtattcactataacttaacact

SEQ ID NO: 692 - RNA, 23 nt, synthetic construct
  source 1..23: mol_type = other RNA
tttagtgttctacaccattactc

SEQ ID NO: 693 - RNA, 23 nt, synthetic construct
  source 1..23: mol_type = other RNA
  modified_base 5: mod_base = OTHER; note = 5'-methyluridine-3'-phosphate
taattagtgttctacaccattac

SEQ ID NO: 694 - RNA, 23 nt, synthetic construct
  source 1..23: mol_type = other RNA
tttagagtgattatgaattagtg

SEQ ID NO: 695 - RNA, 23 nt, synthetic construct
  source 1..23: mol_type = other RNA
tctacccatacatatcccaaata

SEQ ID NO: 696 - RNA, 23 nt, synthetic construct
  source 1..23: mol_type = other RNA
tcacctcttactgatttacccta

SEQ ID NO: 697 - RNA, 23 nt, synthetic construct
  source 1..23: mol_type = other RNA
taacacctcttactgatttaccc

SEQ ID NO: 698 - RNA, 23 nt, synthetic construct
  source 1..23: mol_type = other RNA
ttaacacctcttactgatttacc

SEQ ID NO: 699 - RNA, 23 nt, synthetic construct
  source 1..23: mol_type = other RNA
taataacacctcttactgattta

SEQ ID NO: 700 - RNA, 21 nt, synthetic construct
  source 1..21: mol_type = other RNA
  modified_base 1: mod_base = OTHER; note = 2'-O-methylguanosine-3'-phosphorothioate
  modified_base 2: mod_base = OTHER; note = 2'-O-methyladenosine-3'-phosphorothioate
  modified_base 3: mod_base = OTHER; note = 2'-O-methylguanosine-3'-phosphate
  modified_base 4: mod_base = OTHER; note = 2'-O-methylguanosine-3'-phosphate
  modified_base 5: mod_base = OTHER; note = 2'-O-methylguanosine-3'-phosphate
  modified_base 6: mod_base = OTHER; note = 2'-O-methyluridine-3'-phosphate
  modified_base 7: mod_base = OTHER; note = 2'-deoxy-2'-fluoroadenosine-3'-phosphate
  modified_base 8: mod_base = OTHER; note = 2'-O-methyluridine-3'-phosphate
  modified_base 9: mod_base = OTHER; note = 2'-deoxy-2'-fluorouridine-3'-phosphate
  modified_base 10: mod_base = OTHER; note = 2'-deoxy-2'-fluorouridine-3'-phosphate
  modified_base 11: mod_base = OTHER; note = 2'-deoxy-2'-fluoroguanosine-3'-phosphate
  modified_base 12: mod_base = OTHER; note = 2'-O-methyladenosine-3'-phosphate
  modified_base 13: mod_base = OTHER; note = 2'-O-methyladenosine-3'-phosphate
  modified_base 14: mod_base = OTHER; note = 2'-O-methylguanosine-3'-phosphate
  modified_base 15: mod_base = OTHER; note = 2'-O-methyluridine-3'-phosphate
  modified_base 16: mod_base = OTHER; note = 2'-O-methyladenosine-3'-phosphate
  modified_base 17: mod_base = OTHER; note = 2'-O-methyluridine-3'-phosphate
  modified_base 18: mod_base = OTHER; note = 2'-O-methyladenosine-3'-phosphate
  modified_base 19: mod_base = OTHER; note = 2'-O-methylcytidine-3'-phosphorothioate
  modified_base 20: mod_base = OTHER; note = 2'-O-methylcytidine-3'-phosphorothioate
  modified_base 21: mod_base = OTHER; note = 2'-O-methyladenosine
gagggtatttgaagtatacca

SEQ ID NO: 701 - RNA, 21 nt, synthetic construct
  source 1..21: mol_type = other RNA
  modified_base 1: mod_base = OTHER; note = 2'-O-methylguanosine-3'-phosphorothioate
  modified_base 2: mod_base = OTHER; note = 2'-O-methyladenosine-3'-phosphorothioate
  modified_base 3: mod_base = OTHER; note = 2'-O-methylguanosine-3'-phosphate
  modified_base 4: mod_base = OTHER; note = 2'-O-methylguanosine-3'-phosphate
  modified_base 5: mod_base = OTHER; note = 2'-O-methylguanosine-3'-phosphate
  modified_base 6: mod_base = OTHER; note = 2'-O-methyluridine-3'-phosphate
  modified_base 7: mod_base = OTHER; note = 2'-O-methyladenosine-3'-phosphate
  modified_base 8: mod_base = OTHER; note = 2'-O-methyluridine-3'-phosphate
  modified_base 9: mod_base = OTHER; note = 2'-deoxy-2'-fluorouridine-3'-phosphate
  modified_base 10: mod_base = OTHER; note = 2'-deoxy-2'-fluorouridine-3'-phosphate
  modified_base 11: mod_base = OTHER; note = 2'-deoxy-2'-fluoroguanosine-3'-phosphate
  modified_base 12: mod_base = OTHER; note = 2'-O-methyladenosine-3'-phosphate
  modified_base 13: mod_base = OTHER; note = 2'-O-methyladenosine-3'-phosphate
  modified_base 14: mod_base = OTHER; note = 2'-O-methylguanosine-3'-phosphate
  modified_base 15: mod_base = OTHER; note = 2'-O-methyluridine-3'-phosphate
  modified_base 16: mod_base = OTHER; note = 2'-O-methyladenosine-3'-phosphate
  modified_base 17: mod_base = OTHER; note = 2'-O-methyluridine-3'-phosphate
  modified_base 18: mod_base = OTHER; note = 2'-O-methyladenosine-3'-phosphate
  modified_base 19: mod_base = OTHER; note = 2'-O-methylcytidine-3'-phosphorothioate
  modified_base 20: mod_base = OTHER; note = 2'-O-methylcytidine-3'-phosphorothioate
  modified_base 21: mod_base = OTHER; note = 2'-O-methyladenosine
gagggtatttgaagtatacca

SEQ ID NO: 702 - RNA, 21 nt, synthetic construct
  source 1..21: mol_type = other RNA
  modified_base 1: mod_base = OTHER; note = 2'-O-methylguanosine-3'-phosphorothioate
  modified_base 2: mod_base = OTHER; note = 2'-O-methylguanosine-3'-phosphorothioate
  modified_base 3: mod_base = OTHER; note = 2'-O-methylguanosine-3'-phosphate
  modified_base 4: mod_base = OTHER; note = 2'-O-methyluridine-3'-phosphate
  modified_base 5: mod_base = OTHER; note = 2'-O-methyladenosine-3'-phosphate
  modified_base 6: mod_base = OTHER; note = 2'-O-methyluridine-3'-phosphate
  modified_base 7: mod_base = OTHER; note = 2'-deoxy-2'-fluorouridine-3'-phosphate
  modified_base 8: mod_base = OTHER; note = 2'-O-methyluridine-3'-phosphate
  modified_base 9: mod_base = OTHER; note = 2'-deoxy-2'-fluoroguanosine-3'-phosphate
  modified_base 10: mod_base = OTHER; note = 2'-deoxy-2'-fluoroadenosine-3'-phosphate
  modified_base 11: mod_base = OTHER; note = 2'-deoxy-2'-fluoroadenosine-3'-phosphate
  modified_base 12: mod_base = OTHER; note = 2'-O-methylguanosine-3'-phosphate
  modified_base 13: mod_base = OTHER; note = 2'-O-methyluridine-3'-phosphate
  modified_base 14: mod_base = OTHER; note = 2'-O-methyladenosine-3'-phosphate
  modified_base 15: mod_base = OTHER; note = 2'-O-methyluridine-3'-phosphate
  modified_base 16: mod_base = OTHER; note = 2'-O-methyladenosine-3'-phosphate
  modified_base 17: mod_base = OTHER; note = 2'-O-methylcytidine-3'-phosphate
  modified_base 18: mod_base = OTHER; note = 2'-O-methylcytidine-3'-phosphate
  modified_base 19: mod_base = OTHER; note = 2'-O-methyladenosine-3'-phosphorothioate
  modified_base 20: mod_base = OTHER; note = 2'-O-methyluridine-3'-phosphorothioate
  modified_base 21: mod_base = OTHER; note = 2'-O-methyladenosine
gggtatttgaagtataccata

SEQ ID NO: 703 - RNA, 21 nt, synthetic construct
  source 1..21: mol_type = other RNA
  modified_base 1: mod_base = OTHER; note = 2'-O-methylguanosine-3'-phosphorothioate
  modified_base 2: mod_base = OTHER; note = 2'-O-methylguanosine-3'-phosphorothioate
  modified_base 3: mod_base = OTHER; note = 2'-O-methyluridine-3'-phosphate
  modified_base 4: mod_base = OTHER; note = 2'-O-methyladenosine-3'-phosphate
  modified_base 5: mod_base = OTHER; note = 2'-O-methyluridine-3'-phosphate
  modified_base 6: mod_base = OTHER; note = 2'-O-methyluridine-3'-phosphate
  modified_base 7: mod_base = OTHER; note = 2'-deoxy-2'-fluorouridine-3'-phosphate
  modified_base 8: mod_base = OTHER; note = 2'-O-methylguanosine-3'-phosphate
  modified_base 9: mod_base = OTHER; note = 2'-deoxy-2'-fluoroadenosine-3'-phosphate
  modified_base 10: mod_base = OTHER; note = 2'-deoxy-2'-fluoroadenosine-3'-phosphate
  modified_base 11: mod_base = OTHER; note = 2'-deoxy-2'-fluoroguanosine-3'-phosphate
  modified_base 12: mod_base = OTHER; note = 2'-O-methyluridine-3'-phosphate
  modified_base 13: mod_base = OTHER; note = 2'-O-methyladenosine-3'-phosphate
  modified_base 14: mod_base = OTHER; note = 2'-O-methyluridine-3'-phosphate
  modified_base 15: mod_base = OTHER; note = 2'-O-methyladenosine-3'-phosphate
  modified_base 16: mod_base = OTHER; note = 2'-O-methylcytidine-3'-phosphate
  modified_base 17: mod_base = OTHER; note = 2'-O-methylcytidine-3'-phosphate
  modified_base 18: mod_base = OTHER; note = 2'-O-methyladenosine-3'-phosphate
  modified_base 19: mod_base = OTHER; note = 2'-O-methyluridine-3'-phosphorothioate
  modified_base 20: mod_base = OTHER; note = 2'-O-methyladenosine-3'-phosphorothioate
  modified_base 21: mod_base = OTHER; note = 2'-O-methyladenosine
ggtatttgaagtataccataa

SEQ ID NO: 704 - RNA, 21 nt, synthetic construct
  source 1..21: mol_type = other RNA
  modified_base 1: mod_base = OTHER; note = 2'-O-methyluridine-3'-phosphorothioate
  modified_base 2: mod_base = OTHER; note = 2'-O-methyluridine-3'-phosphorothioate
  modified_base 3: mod_base = OTHER; note = 2'-O-methyluridine-3'-phosphate
  modified_base 4: mod_base = OTHER; note = 2'-O-methylguanosine-3'-phosphate
  modified_base 5: mod_base = OTHER; note = 2'-O-methyladenosine-3'-phosphate
  modified_base 6: mod_base = OTHER; note = 2'-O-methyladenosine-3'-phosphate
  modified_base 7: mod_base = OTHER; note = 2'-deoxy-2'-fluoroguanosine-3'-phosphate
  modified_base 8: mod_base = OTHER; note = 2'-O-methyluridine-3'-phosphate
  modified_base 9: mod_base = OTHER; note = 2'-deoxy-2'-fluoroadenosine-3'-phosphate
  modified_base 10: mod_base = OTHER; note = 2'-deoxy-2'-fluorouridine-3'-phosphate
  modified_base 11: mod_base = OTHER; note = 2'-deoxy-2'-fluoroadenosine-3'-phosphate
  modified_base 12: mod_base = OTHER; note = 2'-O-methylcytidine-3'-phosphate
  modified_base 13: mod_base = OTHER; note = 2'-O-methylcytidine-3'-phosphate
  modified_base 14: mod_base = OTHER; note = 2'-O-methyladenosine-3'-phosphate
  modified_base 15: mod_base = OTHER; note = 2'-O-methyluridine-3'-phosphate
  modified_base 16: mod_base = OTHER; note = 2'-O-methyladenosine-3'-phosphate
  modified_base 17: mod_base = OTHER; note = 2'-O-methylcytidine-3'-phosphate
  modified_base 18: mod_base = OTHER; note = 2'-O-methyladenosine-3'-phosphate
  modified_base 19: mod_base = OTHER; note = 2'-O-methyladenosine-3'-phosphorothioate
  modified_base 20: mod_base = OTHER; note = 2'-O-methylcytidine-3'-phosphorothioate
  modified_base 21: mod_base = OTHER; note = 2'-O-methyladenosine
tttgaagtataccatacaaca

SEQ ID NO: 705 - RNA, 21 nt, synthetic construct
  source 1..21: mol_type = other RNA
  modified_base 1: mod_base = OTHER; note = 2'-O-methyluridine-3'-phosphorothioate
  modified_base 2: mod_base = OTHER; note = 2'-O-methyluridine-3'-phosphorothioate
  modified_base 3: mod_base = OTHER; note = 2'-O-methylguanosine-3'-phosphate
  modified_base 4: mod_base = OTHER; note = 2'-O-methyladenosine-3'-phosphate
  modified_base 5: mod_base = OTHER; note = 2'-O-methyladenosine-3'-phosphate
  modified_base 6: mod_base = OTHER; note = 2'-O-methylguanosine-3'-phosphate
  modified_base 7: mod_base = OTHER; note = 2'-deoxy-2'-fluorouridine-3'-phosphate
  modified_base 8: mod_base = OTHER; note = 2'-O-methyladenosine-3'-phosphate
  modified_base 9: mod_base = OTHER; note = 2'-deoxy-2'-fluorouridine-3'-phosphate
  modified_base 10: mod_base = OTHER; note = 2'-deoxy-2'-fluoroadenosine-3'-phosphate
  modified_base 11: mod_base = OTHER; note = 2'-deoxy-2'-fluorocytidine-3'-phosphate
  modified_base 12: mod_base = OTHER; note = 2'-O-methylcytidine-3'-phosphate
  modified_base 13: mod_base = OTHER; note = 2'-O-methyladenosine-3'-phosphate
  modified_base 14: mod_base = OTHER; note = 2'-O-methyluridine-3'-phosphate
  modified_base 15: mod_base = OTHER; note = 2'-O-methyladenosine-3'-phosphate
  modified_base 16: mod_base = OTHER; note = 2'-O-methylcytidine-3'-phosphate
  modified_base 17: mod_base = OTHER; note = 2'-O-methyladenosine-3'-phosphate
  modified_base 18: mod_base = OTHER; note = 2'-O-methyladenosine-3'-phosphate
  modified_base 19: mod_base = OTHER; note = 2'-O-methylcytidine-3'-phosphorothioate
  modified_base 20: mod_base = OTHER; note = 2'-O-methyluridine-3'-phosphorothioate
  modified_base 21: mod_base = OTHER; note = 2'-O-methyladenosine
ttgaagtataccatacaacta

SEQ ID NO: 706 - RNA, 21 nt, synthetic construct
  source 1..21: mol_type = other RNA
  modified_base 1: mod_base = OTHER; note = 2'-O-methyluridine-3'-phosphorothioate
  modified_base 2: mod_base = OTHER; note = 2'-O-methylguanosine-3'-phosphorothioate
  modified_base 3: mod_base = OTHER; note = 2'-O-methylguanosine-3'-phosphate
  modified_base 4: mod_base = OTHER; note = 2'-O-methyladenosine-3'-phosphate
  modified_base 5: mod_base = OTHER; note = 2'-O-methylcytidine-3'-phosphate
  modified_base 6: mod_base = OTHER; note = 2'-O-methyladenosine-3'-phosphate
  modified_base 7: mod_base = OTHER; note = 2'-deoxy-2'-fluoroadenosine-3'-phosphate
  modified_base 8: mod_base = OTHER; note = 2'-O-methyluridine-3'-phosphate
  modified_base 9: mod_base = OTHER; note = 2'-deoxy-2'-fluoroguanosine-3'-phosphate
  modified_base 10: mod_base = OTHER; note = 2'-deoxy-2'-fluoroguanosine-3'-phosphate
  modified_base 11: mod_base = OTHER; note = 2'-deoxy-2'-fluorocytidine-3'-phosphate
  modified_base 12: mod_base = OTHER; note = 2'-O-methyluridine-3'-phosphate
  modified_base 13: mod_base = OTHER; note = 2'-O-methyladenosine-3'-phosphate
  modified_base 14: mod_base = OTHER; note = 2'-O-methylcytidine-3'-phosphate
  modified_base 15: mod_base = OTHER; note = 2'-O-methyluridine-3'-phosphate
  modified_base 16: mod_base = OTHER; note = 2'-O-methylcytidine-3'-phosphate
  modified_base 17: mod_base = OTHER; note = 2'-O-methyladenosine-3'-phosphate
  modified_base 18: mod_base = OTHER; note = 2'-O-methyladenosine-3'-phosphate
  modified_base 19: mod_base = OTHER; note = 2'-O-methylguanosine-3'-phosphorothioate
  modified_base 20: mod_base = OTHER; note = 2'-O-methylcytidine-3'-phosphorothioate
  modified_base 21: mod_base = OTHER; note = 2'-O-methyladenosine
tggacaatggctactcaagca

SEQ ID NO: 707 - RNA, 21 nt, synthetic construct
  source 1..21: mol_type = other RNA
  modified_base 1: mod_base = OTHER; note = 2'-O-methylguanosine-3'-phosphorothioate
  modified_base 2: mod_base = OTHER; note = 2'-O-methyladenosine-3'-phosphorothioate
  modified_base 3: mod_base = OTHER; note = 2'-O-methylcytidine-3'-phosphate
  modified_base 4: mod_base = OTHER; note = 2'-O-methyladenosine-3'-phosphate
  modified_base 5: mod_base = OTHER; note = 2'-O-methyladenosine-3'-phosphate
  modified_base 6: mod_base = OTHER; note = 2'-O-methyluridine-3'-phosphate
  modified_base 7: mod_base = OTHER; note = 2'-O-methylguanosine-3'-phosphate
  modified_base 8: mod_base = OTHER; note = 2'-O-methylguanosine-3'-phosphate
  modified_base 9: mod_base = OTHER; note = 2'-deoxy-2'-fluorocytidine-3'-phosphate
  modified_base 10: mod_base = OTHER; note = 2'-deoxy-2'-fluorouridine-3'-phosphate
  modified_base 11: mod_base = OTHER; note = 2'-deoxy-2'-fluoroadenosine-3'-phosphate
  modified_base 12: mod_base = OTHER; note = 2'-O-methylcytidine-3'-phosphate
  modified_base 13: mod_base = OTHER; note = 2'-O-methyluridine-3'-phosphate
  modified_base 14: mod_base = OTHER; note = 2'-O-methylcytidine-3'-phosphate
  modified_base 15: mod_base = OTHER; note = 2'-O-methyladenosine-3'-phosphate
  modified_base 16: mod_base = OTHER; note = 2'-O-methyladenosine-3'-phosphate
  modified_base 17: mod_base = OTHER; note = 2'-O-methylguanosine-3'-phosphate
  modified_base 18: mod_base = OTHER; note = 2'-O-methylcytidine-3'-phosphate
  modified_base 19: mod_base = OTHER; note = 2'-O-methyluridine-3'-phosphorothioate
  modified_base 20: mod_base = OTHER; note = 2'-O-methylguanosine-3'-phosphorothioate
  modified_base 21: mod_base = OTHER; note = 2'-O-methyladenosine
gacaatggctactcaagctga

SEQ ID NO: 708 - RNA, 21 nt, synthetic construct
  source 1..21: mol_type = other RNA
  modified_base 1: mod_base = OTHER; note = 2'-O-methyladenosine-3'-phosphorothioate
  modified_base 2: mod_base = OTHER; note = 2'-O-methylcytidine-3'-phosphorothioate
  modified_base 3: mod_base = OTHER; note = 2'-O-methyladenosine-3'-phosphate
  modified_base 4: mod_base = OTHER; note = 2'-O-methyladenosine-3'-phosphate
  modified_base 5: mod_base = OTHER; note = 2'-O-methyluridine-3'-phosphate
  modified_base 6: mod_base = OTHER; note = 2'-O-methylguanosine-3'-phosphate
  modified_base 7: mod_base = OTHER; note = 2'-deoxy-2'-fluoroguanosine-3'-phosphate
  modified_base 8: mod_base = OTHER; note = 2'-O-methylcytidine-3'-phosphate
  modified_base 9: mod_base = OTHER; note = 2'-deoxy-2'-fluorouridine-3'-phosphate
  modified_base 10: mod_base = OTHER; note = 2'-deoxy-2'-fluoroadenosine-3'-phosphate
  modified_base 11: mod_base = OTHER; note = 2'-deoxy-2'-fluorocytidine-3'-phosphate
  modified_base 12: mod_base = OTHER; note = 2'-O-methyluridine-3'-phosphate
  modified_base 13: mod_base = OTHER; note = 2'-O-methylcytidine-3'-phosphate
  modified_base 14: mod_base = OTHER; note = 2'-O-methyladenosine-3'-phosphate
  modified_base 15: mod_base = OTHER; note = 2'-O-methyladenosine-3'-phosphate
  modified_base 16: mod_base = OTHER; note = 2'-O-methylguanosine-3'-phosphate
  modified_base 17: mod_base = OTHER; note = 2'-O-methylcytidine-3'-phosphate
  modified_base 18: mod_base = OTHER; note = 2'-O-methyluridine-3'-phosphate
  modified_base 19: mod_base = OTHER; note = 2'-O-methylguanosine-3'-phosphorothioate
  modified_base 20: mod_base = OTHER; note = 2'-O-methyladenosine-3'-phosphorothioate
  modified_base 21: mod_base = OTHER; note = 2'-O-methyladenosine
acaatggctactcaagctgaa

SEQ ID NO: 709 - RNA, 21 nt, synthetic construct
  source 1..21: mol_type = other RNA
  modified_base 1: mod_base = OTHER; note = 2'-O-methyladenosine-3'-phosphorothioate
  modified_base 2: mod_base = OTHER; note = 2'-O-methyladenosine-3'-phosphorothioate
  modified_base 3: mod_base = OTHER; note = 2'-O-methylguanosine-3'-phosphate
  modified_base 4: mod_base = OTHER; note = 2'-O-methylcytidine-3'-phosphate
  modified_base 5: mod_base = OTHER; note = 2'-O-methyluridine-3'-phosphate
  modified_base 6: mod_base = OTHER; note = 2'-O-methylguanosine-3'-phosphate
  modified_base 7: mod_base = OTHER; note = 2'-O-methyladenosine-3'-phosphate
  modified_base 8: mod_base = OTHER; note = 2'-O-methyluridine-3'-phosphate
  modified_base 9: mod_base = OTHER; note = 2'-deoxy-2'-fluorouridine-3'-phosphate
  modified_base 10: mod_base = OTHER; note = 2'-deoxy-2'-fluorouridine-3'-phosphate
  modified_base 11: mod_base = OTHER; note = 2'-deoxy-2'-fluoroguanosine-3'-phosphate
  modified_base 12: mod_base = OTHER; note = 2'-O-methyladenosine-3'-phosphate
  modified_base 13: mod_base = OTHER; note = 2'-O-methyluridine-3'-phosphate
  modified_base 14: mod_base = OTHER; note = 2'-O-methylguanosine-3'-phosphate
  modified_base 15: mod_base = OTHER; note = 2'-O-methylguanosine-3'-phosphate
  modified_base 16: mod_base = OTHER; note = 2'-O-methyladenosine-3'-phosphate
  modified_base 17: mod_base = OTHER; note = 2'-O-methylguanosine-3'-phosphate
  modified_base 18: mod_base = OTHER; note = 2'-O-methyluridine-3'-phosphate
  modified_base 19: mod_base = OTHER; note = 2'-O-methyluridine-3'-phosphorothioate
  modified_base 20: mod_base = OTHER; note = 2'-O-methylguanosine-3'-phosphorothioate
  modified_base 21: mod_base = OTHER; note = 2'-O-methyladenosine
aagctgatttgatggagttga

SEQ ID NO: 710 - RNA, 21 nt, synthetic construct
  source 1..21: mol_type = other RNA
  modified_base 1: mod_base = OTHER; note = 2'-O-methyladenosine-3'-phosphorothioate
  modified_base 2: mod_base = OTHER; note = 2'-O-methylguanosine-3'-phosphorothioate
  modified_base 3: mod_base = OTHER; note = 2'-O-methylcytidine-3'-phosphate
  modified_base 4: mod_base = OTHER; note = 2'-O-methyluridine-3'-phosphate
  modified_base 5: mod_base = OTHER; note = 2'-O-methylguanosine-3'-phosphate
  modified_base 6: mod_base = OTHER; note = 2'-O-methyladenosine-3'-phosphate
  modified_base 7: mod_base = OTHER; note = 2'-O-methyluridine-3'-phosphate
  modified_base 8: mod_base = OTHER; note = 2'-O-methyluridine-3'-phosphate
  modified_base 9: mod_base = OTHER; note = 2'-deoxy-2'-fluorouridine-3'-phosphate
  modified_base 10: mod_base = OTHER; note = 2'-deoxy-2'-fluoroguanosine-3'-phosphate
  modified_base 11: mod_base = OTHER; note = 2'-deoxy-2'-fluoroadenosine-3'-phosphate
  modified_base 12: mod_base = OTHER; note = 2'-O-methyluridine-3'-phosphate
  modified_base 13: mod_base = OTHER; note = 2'-O-methylguanosine-3'-phosphate
  modified_base 14: mod_base = OTHER; note = 2'-O-methylguanosine-3'-phosphate
  modified_base 15: mod_base = OTHER; note = 2'-O-methyladenosine-3'-phosphate
  modified_base 16: mod_base = OTHER; note = 2'-O-methylguanosine-3'-phosphate
  modified_base 17: mod_base = OTHER; note = 2'-O-methyluridine-3'-phosphate
  modified_base 18: mod_base = OTHER; note = 2'-O-methyluridine-3'-phosphate
  modified_base 19: mod_base = OTHER; note = 2'-O-methylguanosine-3'-phosphorothioate
  modified_base 20: mod_base = OTHER; note = 2'-O-methylguanosine-3'-phosphorothioate
  modified_base 21: mod_base = OTHER; note = 2'-O-methyladenosine
agctgatttgatggagttgga

SEQ ID NO: 711 - RNA, 21 nt, synthetic construct
  source 1..21: mol_type = other RNA
  modified_base 1: mod_base = OTHER; note = 2'-O-methylcytidine-3'-phosphorothioate
  modified_base 2: mod_base = OTHER; note = 2'-O-methylcytidine-3'-phosphorothioate
  modified_base 3: mod_base = OTHER; note = 2'-O-methyluridine-3'-phosphate
  modified_base 4: mod_base = OTHER; note = 2'-O-methyluridine-3'-phosphate
  modified_base 5: mod_base = OTHER; note = 2'-O-methylcytidine-3'-phosphate
  modified_base 6: mod_base = OTHER; note = 2'-O-methyluridine-3'-phosphate
  modified_base 7: mod_base = OTHER; note = 2'-O-methylcytidine-3'-phosphate
  modified_base 8: mod_base = OTHER; note = 2'-O-methyluridine-3'-phosphate
  modified_base 9: mod_base = OTHER; note = 2'-deoxy-2'-fluoroguanosine-3'-phosphate
  modified_base 10: mod_base = OTHER; note = 2'-deoxy-2'-fluoroadenosine-3'-phosphate
  modified_base 11: mod_base = OTHER; note = 2'-deoxy-2'-fluoroguanosine-3'-phosphate
  modified_base 12: mod_base = OTHER; note = 2'-O-methyluridine-3'-phosphate
  modified_base 13: mod_base = OTHER; note = 2'-O-methylguanosine-3'-phosphate
  modified_base 14: mod_base = OTHER; note = 2'-O-methylguanosine-3'-phosphate
  modified_base 15: mod_base = OTHER; note = 2'-O-methyluridine-3'-phosphate
  modified_base 16: mod_base = OTHER; note = 2'-O-methyladenosine-3'-phosphate
  modified_base 17: mod_base = OTHER; note = 2'-O-methyladenosine-3'-phosphate
  modified_base 18: mod_base = OTHER; note = 2'-O-methyladenosine-3'-phosphate
  modified_base 19: mod_base = OTHER; note = 2'-O-methylguanosine-3'-phosphorothioate
  modified_base 20: mod_base = OTHER; note = 2'-O-methylguanosine-3'-phosphorothioate
  modified_base 21: mod_base = OTHER; note = 2'-O-methyladenosine
ccttctctgagtggtaaagga

SEQ ID NO: 712 - RNA, 21 nt, synthetic construct
  source 1..21: mol_type = other RNA
  modified_base 1: mod_base = OTHER; note = 2'-O-methylcytidine-3'-phosphorothioate
  modified_base 2: mod_base = OTHER; note = 2'-O-methyladenosine-3'-phosphorothioate
  modified_base 3: mod_base = OTHER; note = 2'-O-methylguanosine-3'-phosphate
  modified_base 4: mod_base = OTHER; note = 2'-O-methyluridine-3'-phosphate
  modified_base 5: mod_base = OTHER; note = 2'-O-methylcytidine-3'-phosphate
  modified_base 6: mod_base = OTHER; note = 2'-O-methylcytidine-3'-phosphate
  modified_base 7: mod_base = OTHER; note = 2'-deoxy-2'-fluorouridine-3'-phosphate
  modified_base 8: mod_base = OTHER; note = 2'-O-methyluridine-3'-phosphate
  modified_base 9: mod_base = OTHER; note = 2'-deoxy-2'-fluorocytidine-3'-phosphate
  modified_base 10: mod_base = OTHER; note = 2'-deoxy-2'-fluoroadenosine-3'-phosphate
  modified_base 11: mod_base = OTHER; note = 2'-deoxy-2'-fluorocytidine-3'-phosphate
  modified_base 12: mod_base = OTHER; note = 2'-O-methyluridine-3'-phosphate
  modified_base 13: mod_base = OTHER; note = 2'-O-methylcytidine-3'-phosphate
  modified_base 14: mod_base = OTHER; note = 2'-O-methyladenosine-3'-phosphate
  modified_base 15: mod_base = OTHER; note = 2'-O-methyladenosine-3'-phosphate
  modified_base 16: mod_base = OTHER; note = 2'-O-methylguanosine-3'-phosphate
  modified_base 17: mod_base = OTHER; note = 2'-O-methyladenosine-3'-phosphate
  modified_base 18: mod_base = OTHER; note = 2'-O-methyladenosine-3'-phosphate
  modified_base 19: mod_base = OTHER; note = 2'-O-methylcytidine-3'-phosphorothioate
  modified_base 20: mod_base = OTHER; note = 2'-O-methyladenosine-3'-phosphorothioate
  modified_base 21: mod_base = OTHER; note = 2'-O-methyladenosine
cagtccttcactcaagaacaa

SEQ ID NO: 713 - RNA, 21 nt, synthetic construct
  source 1..21: mol_type = other RNA
  modified_base 1: mod_base = OTHER; note = 2'-O-methylcytidine-3'-phosphorothioate
  modified_base 2: mod_base = OTHER; note = 2'-O-methyluridine-3'-phosphorothioate
  modified_base 3: mod_base = OTHER; note = 2'-O-methyluridine-3'-phosphate
  modified_base 4: mod_base = OTHER; note = 2'-O-methylcytidine-3'-phosphate
  modified_base 5: mod_base = OTHER; note = 2'-O-methyladenosine-3'-phosphate
  modified_base 6: mod_base = OTHER; note = 2'-O-methylcytidine-3'-phosphate
  modified_base 7: mod_base = OTHER; note = 2'-O-methyluridine-3'-phosphate
  modified_base 8: mod_base = OTHER; note = 2'-O-methylcytidine-3'-phosphate
  modified_base 9: mod_base = OTHER; note = 2'-deoxy-2'-fluoroadenosine-3'-phosphate
  modified_base 10: mod_base = OTHER; note = 2'-deoxy-2'-fluoroadenosine-3'-phosphate
  modified_base 11: mod_base = OTHER; note = 2'-deoxy-2'-fluoroguanosine-3'-phosphate
  modified_base 12: mod_base = OTHER; note = 2'-O-methyladenosine-3'-phosphate
  modified_base 13: mod_base = OTHER; note = 2'-O-methyladenosine-3'-phosphate
  modified_base 14: mod_base = OTHER; note = 2'-O-methylcytidine-3'-phosphate
  modified_base 15: mod_base = OTHER; note = 2'-O-methyladenosine-3'-phosphate
  modified_base 16: mod_base = OTHER; note = 2'-O-methyladenosine-3'-phosphate
  modified_base 17: mod_base = OTHER; note = 2'-O-methylguanosine-3'-phosphate
  modified_base 18: mod_base = OTHER; note = 2'-O-methyluridine-3'-phosphate
  modified_base 19: mod_base = OTHER; note = 2'-O-methyladenosine-3'-phosphorothioate
  modified_base 20: mod_base = OTHER; note = 2'-O-methylguanosine-3'-phosphorothioate
  modified_base 21: mod_base = OTHER; note = 2'-O-methyladenosine
cttcactcaagaacaagtaga

SEQ ID NO: 714 - RNA, 21 nt, synthetic construct
  source 1..21: mol_type = other RNA
  modified_base 1: mod_base = OTHER; note = 2'-O-methylcytidine-3'-phosphorothioate
  modified_base 2: mod_base = OTHER; note = 2'-O-methyladenosine-3'-phosphorothioate
  modified_base 3: mod_base = OTHER; note = 2'-O-methylcytidine-3'-phosphate
  modified_base 4: mod_base = OTHER; note = 2'-O-methyluridine-3'-phosphate
  modified_base 5: mod_base = OTHER; note = 2'-O-methylcytidine-3'-phosphate
  modified_base 6: mod_base = OTHER; note = 2'-O-methyladenosine-3'-phosphate
  modified_base 7: mod_base = OTHER; note = 2'-O-methyladenosine-3'-phosphate
  modified_base 8: mod_base = OTHER; note = 2'-O-methylguanosine-3'-phosphate
  modified_base 9: mod_base = OTHER; note = 2'-deoxy-2'-fluoroadenosine-3'-phosphate
  modified_base 10: mod_base = OTHER; note = 2'-deoxy-2'-fluoroadenosine-3'-phosphate
  modified_base 11: mod_base = OTHER; note = 2'-deoxy-2'-fluorocytidine-3'-phosphate
  modified_base 12: mod_base = OTHER; note = 2'-O-methyladenosine-3'-phosphate
  modified_base 13: mod_base = OTHER; note = 2'-O-methyladenosine-3'-phosphate
  modified_base 14: mod_base = OTHER; note = 2'-O-methylguanosine-3'-phosphate
  modified_base 15: mod_base = OTHER; note = 2'-O-methyluridine-3'-phosphate
  modified_base 16: mod_base = OTHER; note = 2'-O-methyladenosine-3'-phosphate
  modified_base 17: mod_base = OTHER; note = 2'-O-methylguanosine-3'-phosphate
  modified_base 18: mod_base = OTHER; note = 2'-O-methylcytidine-3'-phosphate
  modified_base 19: mod_base = OTHER; note = 2'-O-methyluridine-3'-phosphorothioate
  modified_base 20: mod_base = OTHER; note = 2'-O-methylguanosine-3'-phosphorothioate
  modified_base 21: mod_base = OTHER; note = 2'-O-methyladenosine
cactcaagaacaagtagctga

SEQ ID NO: 715 - RNA, 21 nt, synthetic construct
  source 1..21: mol_type = other RNA
  modified_base 1: mod_base = OTHER; note = 2'-O-methylguanosine-3'-phosphorothioate
  modified_base 2: mod_base = OTHER; note = 2'-O-methyluridine-3'-phosphorothioate
  modified_base 3: mod_base = OTHER; note = 2'-O-methyladenosine-3'-phosphate
  modified_base 4: mod_base = OTHER; note = 2'-O-methylguanosine-3'-phosphate
  modified_base 5: mod_base = OTHER; note = 2'-O-methylcytidine-3'-phosphate
  modified_base 6: mod_base = OTHER; note = 2'-O-methyluridine-3'-phosphate
  modified_base 7: mod_base = OTHER; note = 2'-deoxy-2'-fluoroguanosine-3'-phosphate
  modified_base 8: mod_base = OTHER; note = 2'-O-methyladenosine-3'-phosphate
  modified_base 9: mod_base = OTHER; note = 2'-deoxy-2'-fluorouridine-3'-phosphate
  modified_base 10: mod_base = OTHER; note = 2'-deoxy-2'-fluoroadenosine-3'-phosphate
  modified_base 11: mod_base = OTHER; note = 2'-deoxy-2'-fluorouridine-3'-phosphate
  modified_base 12: mod_base = OTHER; note = 2'-O-methyluridine-3'-phosphate
  modified_base 13: mod_base = OTHER; note = 2'-O-methylguanosine-3'-phosphate
  modified_base 14: mod_base = OTHER; note = 2'-O-methyladenosine-3'-phosphate
  modified_base 15: mod_base = OTHER; note = 2'-O-methyluridine-3'-phosphate
  modified_base 16: mod_base = OTHER; note = 2'-O-methylguanosine-3'-phosphate
  modified_base 17: mod_base = OTHER; note = 2'-O-methylguanosine-3'-phosphate
  modified_base 18: mod_base = OTHER; note = 2'-O-methyladenosine-3'-phosphate
  modified_base 19: mod_base = OTHER; note = 2'-O-methylcytidine-3'-phosphorothioate
  modified_base 20: mod_base = OTHER; note = 2'-O-methyladenosine-3'-phosphorothioate
  modified_base 21: mod_base = OTHER; note = 2'-O-methyladenosine
gtagctgatattgatggacaa

SEQ ID NO: 716 - RNA, 21 nt, synthetic construct
  source 1..21: mol_type = other RNA
  modified_base 1: mod_base = OTHER; note = 2'-O-methyladenosine-3'-phosphorothioate
  modified_base 2: mod_base = OTHER; note = 2'-O-methyluridine-3'-phosphorothioate
  modified_base 3: mod_base = OTHER; note = 2'-O-methyluridine-3'-phosphate
  modified_base 4: mod_base = OTHER; note = 2'-O-methylguanosine-3'-phosphate
  modified_base 5: mod_base = OTHER; note = 2'-O-methyladenosine-3'-phosphate
  modified_base 6: mod_base = OTHER; note = 2'-O-methyluridine-3'-phosphate
  modified_base 7: mod_base = OTHER; note = 2'-deoxy-2'-fluoroguanosine-3'-phosphate
  modified_base 8: mod_base = OTHER; note = 2'-O-methylguanosine-3'-phosphate
  modified_base 9: mod_base = OTHER; note = 2'-deoxy-2'-fluoroadenosine-3'-phosphate
  modified_base 10: mod_base = OTHER; note = 2'-deoxy-2'-fluorocytidine-3'-phosphate
  modified_base 11: mod_base = OTHER; note = 2'-deoxy-2'-fluoroadenosine-3'-phosphate
  modified_base 12: mod_base = OTHER; note = 2'-O-methylguanosine-3'-phosphate
  modified_base 13: mod_base = OTHER; note = 2'-O-methyluridine-3'-phosphate
  modified_base 14: mod_base = OTHER; note = 2'-O-methyladenosine-3'-phosphate
  modified_base 15: mod_base = OTHER; note = 2'-O-methyluridine-3'-phosphate
  modified_base 16: mod_base = OTHER; note = 2'-O-methylguanosine-3'-phosphate
  modified_base 17: mod_base = OTHER; note = 2'-O-methylcytidine-3'-phosphate
  modified_base 18: mod_base = OTHER; note = 2'-O-methyladenosine-3'-phosphate
  modified_base 19: mod_base = OTHER; note = 2'-O-methyladenosine-3'-phosphorothioate
  modified_base 20: mod_base = OTHER; note = 2'-O-methyluridine-3'-phosphorothioate
  modified_base 21: mod_base = OTHER; note = 2'-O-methyladenosine
attgatggacagtatgcaata

SEQ ID NO: 717 - RNA, 21 nt, synthetic construct
  source 1..21: mol_type = other RNA
  modified_base 1: mod_base = OTHER; note = 2'-O-methyladenosine-3'-phosphorothioate
  modified_base 2: mod_base = OTHER; note = 2'-O-methylguanosine-3'-phosphorothioate
  modified_base 3: mod_base = OTHER; note = 2'-O-methyluridine-3'-phosphate
  modified_base 4: mod_base = OTHER; note = 2'-O-methyladenosine-3'-phosphate
  modified_base 5: mod_base = OTHER; note = 2'-O-methyluridine-3'-phosphate
  modified_base 6: mod_base = OTHER; note = 2'-O-methylguanosine-3'-phosphate
  modified_base 7: mod_base = OTHER; note = 2'-O-methylcytidine-3'-phosphate
  modified_base 8: mod_base = OTHER; note = 2'-O-methyladenosine-3'-phosphate
  modified_base 9: mod_base = OTHER; note = 2'-deoxy-2'-fluoroadenosine-3'-phosphate
  modified_base 10: mod_base = OTHER; note = 2'-deoxy-2'-fluorouridine-3'-phosphate
  modified_base 11: mod_base = OTHER; note = 2'-deoxy-2'-fluoroguanosine-3'-phosphate
  modified_base 12: mod_base = OTHER; note = 2'-O-methyladenosine-3'-phosphate
  modified_base 13: mod_base = OTHER; note = 2'-O-methylcytidine-3'-phosphate
  modified_base 14: mod_base = OTHER; note = 2'-O-methyluridine-3'-phosphate
  modified_base 15: mod_base = OTHER; note = 2'-O-methylcytidine-3'-phosphate
  modified_base 16: mod_base = OTHER; note = 2'-O-methylguanosine-3'-phosphate
  modified_base 17: mod_base = OTHER; note = 2'-O-methyladenosine-3'-phosphate
  modified_base 18: mod_base = OTHER; note = 2'-O-methylguanosine-3'-phosphate
  modified_base 19: mod_base = OTHER; note = 2'-O-methylcytidine-3'-phosphorothioate
  modified_base 20: mod_base = OTHER; note = 2'-O-methyluridine-3'-phosphorothioate
  modified_base 21: mod_base = OTHER; note = 2'-O-methyladenosine
agtatgcaatgactcgagcta

SEQ ID NO: 718 - RNA, 21 nt, synthetic construct
  source 1..21: mol_type = other RNA
  modified_base 1: mod_base = OTHER; note = 2'-O-methylguanosine-3'-phosphorothioate
  modified_base 2: mod_base = OTHER; note = 2'-O-methylguanosine-3'-phosphorothioate
  modified_base 3: mod_base = OTHER; note = 2'-O-methyluridine-3'-phosphate
  modified_base 4: mod_base = OTHER; note = 2'-O-methyladenosine-3'-phosphate
  modified_base 5: mod_base = OTHER; note = 2'-O-methylcytidine-3'-phosphate
  modified_base 6: mod_base = OTHER; note = 2'-O-methylguanosine-3'-phosphate
  modified_base 7: mod_base = OTHER; note = 2'-deoxy-2'-fluoroadenosine-3'-phosphate
  modified_base 8: mod_base = OTHER; note = 2'-O-methylguanosine-3'-phosphate
  modified_base 9: mod_base = OTHER; note = 2'-deoxy-2'-fluorocytidine-3'-phosphate
  modified_base 10: mod_base = OTHER; note = 2'-deoxy-2'-fluorouridine-3'-phosphate
  modified_base 11: mod_base = OTHER; note = 2'-deoxy-2'-fluoroguanosine-3'-phosphate
  modified_base 12: mod_base = OTHER; note = 2'-O-methylcytidine-3'-phosphate
  modified_base 13: mod_base = OTHER; note = 2'-O-methyluridine-3'-phosphate
  modified_base 14: mod_base = OTHER; note = 2'-O-methyladenosine-3'-phosphate
  modified_base 15: mod_base = OTHER; note = 2'-O-methyluridine-3'-phosphate
  modified_base 16: mod_base = OTHER; note = 2'-O-methylguanosine-3'-phosphate
  modified_base 17: mod_base = OTHER; note = 2'-O-methyluridine-3'-phosphate
  modified_base 18: mod_base = OTHER; note = 2'-O-methyluridine-3'-phosphate
  modified_base 19: mod_base = OTHER; note = 2'-O-methylcytidine-3'-phosphorothioate
  modified_base 20: mod_base = OTHER; note = 2'-O-methylcytidine-3'-phosphorothioate
  modified_base 21: mod_base = OTHER; note = 2'-O-methyladenosine
ggtacgagctgctatgttcca

SEQ ID NO: 719 - RNA, 21 nt, synthetic construct
  source 1..21: mol_type = other RNA
  modified_base 1: mod_base = OTHER; note = 2'-O-methyladenosine-3'-phosphorothioate
  modified_base 2: mod_base = OTHER; note = 2'-O-methylcytidine-3'-phosphorothioate
  modified_base 3: mod_base = OTHER; note = 2'-O-methylguanosine-3'-phosphate
  modified_base 4: mod_base = OTHER; note = 2'-O-methyladenosine-3'-phosphate
  modified_base 5: mod_base = OTHER; note = 2'-O-methylguanosine-3'-phosphate
  modified_base 6: mod_base = OTHER; note = 2'-O-methylcytidine-3'-phosphate
  modified_base 7: mod_base = OTHER; note = 2'-O-methyluridine-3'-phosphate
  modified_base 8: mod_base = OTHER; note = 2'-O-methylguanosine-3'-phosphate
  modified_base 9: mod_base = OTHER; note = 2'-deoxy-2'-fluorocytidine-3'-phosphate
  modified_base 10: mod_base = OTHER; note = 2'-deoxy-2'-fluorouridine-3'-phosphate
  modified_base 11: mod_base = OTHER; note = 2'-deoxy-2'-fluoroadenosine-3'-phosphate
  modified_base 12: mod_base = OTHER; note = 2'-O-methyluridine-3'-phosphate
  modified_base 13: mod_base = OTHER; note = 2'-O-methylguanosine-3'-phosphate
  modified_base 14: mod_base = OTHER; note = 2'-O-methyluridine-3'-phosphate
  modified_base 15: mod_base = OTHER; note = 2'-O-methyluridine-3'-phosphate
  modified_base 16: mod_base = OTHER; note = 2'-O-methylcytidine-3'-phosphate
  modified_base 17: mod_base = OTHER; note = 2'-O-methylcytidine-3'-phosphate
  modified_base 18: mod_base = OTHER; note = 2'-O-methylcytidine-3'-phosphate
  modified_base 19: mod_base = OTHER; note = 2'-O-methyluridine-3'-phosphorothioate
  modified_base 20: mod_base = OTHER; note = 2'-O-methylguanosine-3'-phosphorothioate
  modified_base 21: mod_base = OTHER; note = 2'-O-methyladenosine
acgagctgctatgttccctga

SEQ ID NO: 720 - RNA, 21 nt, synthetic construct
  source 1..21: mol_type = other RNA
  modified_base 1: mod_base = OTHER; note = 2'-O-methyluridine-3'-phosphorothioate
  modified_base 2: mod_base = OTHER; note = 2'-O-methylguanosine-3'-phosphorothioate
  modified_base 3: mod_base = OTHER; note = 2'-O-methyluridine-3'-phosphate
  modified_base 4: mod_base = OTHER; note = 2'-O-methyluridine-3'-phosphate
  modified_base 5: mod_base = OTHER; note = 2'-O-methylcytidine-3'-phosphate
  modified_base 6: mod_base = OTHER; note = 2'-O-methylcytidine-3'-phosphate
  modified_base 7: mod_base = OTHER; note = 2'-O-methylcytidine-3'-phosphate
  modified_base 8: mod_base = OTHER; note = 2'-O-methyluridine-3'-phosphate
  modified_base 9: mod_base = OTHER; note = 2'-deoxy-2'-fluoroguanosine-3'-phosphate
  modified_base 10: mod_base = OTHER; note = 2'-deoxy-2'-fluoroadenosine-3'-phosphate
  modified_base 11: mod_base = OTHER; note = 2'-deoxy-2'-fluoroguanosine-3'-phosphate
  modified_base 12: mod_base = OTHER; note = 2'-O-methyladenosine-3'-phosphate
  modified_base 13: mod_base = OTHER; note = 2'-O-methylcytidine-3'-phosphate
  modified_base 14: mod_base = OTHER; note = 2'-O-methyladenosine-3'-phosphate
  modified_base 15: mod_base = OTHER; note = 2'-O-methyluridine-3'-phosphate
  modified_base 16: mod_base = OTHER; note = 2'-O-methyluridine-3'-phosphate
  modified_base 17: mod_base = OTHER; note = 2'-O-methyladenosine-3'-phosphate
  modified_base 18: mod_base = OTHER; note = 2'-O-methylguanosine-3'-phosphate
  modified_base 19: mod_base = OTHER; note = 2'-O-methyladenosine-3'-phosphorothioate
  modified_base 20: mod_base = OTHER; note = 2'-O-methyluridine-3'-phosphorothioate
  modified_base 21: mod_base = OTHER; note = 2'-O-methyladenosine
tgttccctgagacattagata

SEQ ID NO: 721 - RNA, 21 nt, synthetic construct
  source 1..21: mol_type = other RNA
  modified_base 1: mod_base = OTHER; note = 2'-O-methyluridine-3'-phosphorothioate
  modified_base 2: mod_base = OTHER; note = 2'-O-methyluridine-3'-phosphorothioate
  modified_base 3: mod_base = OTHER; note = 2'-O-methylcytidine-3'-phosphate
  modified_base 4: mod_base = OTHER; note = 2'-O-methylcytidine-3'-phosphate
  modified_base 5: mod_base = OTHER; note = 2'-O-methylcytidine-3'-phosphate
  modified_base 6: mod_base = OTHER; note = 2'-O-methyluridine-3'-phosphate
  modified_base 7: mod_base = OTHER; note = 2'-deoxy-2'-fluoroguanosine-3'-phosphate
  modified_base 8: mod_base = OTHER; note = 2'-O-methyladenosine-3'-phosphate
  modified_base 9: mod_base = OTHER; note = 2'-deoxy-2'-fluoroguanosine-3'-phosphate
  modified_base 10: mod_base = OTHER; note = 2'-deoxy-2'-fluoroadenosine-3'-phosphate
  modified_base 11: mod_base = OTHER; note = 2'-deoxy-2'-fluorocytidine-3'-phosphate
  modified_base 12: mod_base = OTHER; note = 2'-O-methyladenosine-3'-phosphate
  modified_base 13: mod_base = OTHER; note = 2'-O-methyluridine-3'-phosphate
  modified_base 14: mod_base = OTHER; note = 2'-O-methyluridine-3'-phosphate
  modified_base 15: mod_base = OTHER; note = 2'-O-methyladenosine-3'-phosphate
  modified_base 16: mod_base = OTHER; note = 2'-O-methylguanosine-3'-phosphate
  modified_base 17: mod_base = OTHER; note = 2'-O-methyladenosine-3'-phosphate
  modified_base 18: mod_base = OTHER; note = 2'-O-methyluridine-3'-phosphate
  modified_base 19: mod_base = OTHER; note = 2'-O-methylguanosine-3'-phosphorothioate
  modified_base 20: mod_base = OTHER; note = 2'-O-methyladenosine-3'-phosphorothioate
  modified_base 21: mod_base = OTHER; note = 2'-O-methyladenosine
ttccctgagacattagatgaa

SEQ ID NO: 722 - RNA, 21 nt, synthetic construct
  source 1..21: mol_type = other RNA
  modified_base 1: mod_base = OTHER; note = 2'-O-methyladenosine-3'-phosphorothioate
  modified_base 2: mod_base = OTHER; note = 2'-O-methylguanosine-3'-phosphorothioate
  modified_base 3: mod_base = OTHER; note = 2'-O-methyladenosine-3'-phosphate
  modified_base 4: mod_base = OTHER; note = 2'-O-methyluridine-3'-phosphate
  modified_base 5: mod_base = OTHER; note = 2'-O-methylguanosine-3'-phosphate
  modified_base 6: mod_base = OTHER; note = 2'-O-methyladenosine-3'-phosphate
  modified_base 7: mod_base = OTHER; note = 2'-deoxy-2'-fluoroguanosine-3'-phosphate
  modified_base 8: mod_base = OTHER; note = 2'-O-methylguanosine-3'-phosphate
  modified_base 9: mod_base = OTHER; note = 2'-deoxy-2'-fluoroguanosine-3'-phosphate
  modified_base 10: mod_base = OTHER; note = 2'-deoxy-2'-fluorocytidine-3'-phosphate
  modified_base 11: mod_base = OTHER; note = 2'-deoxy-2'-fluoroadenosine-3'-phosphate
  modified_base 12: mod_base = OTHER; note = 2'-O-methyluridine-3'-phosphate
  modified_base 13: mod_base = OTHER; note = 2'-O-methylguanosine-3'-phosphate
  modified_base 14: mod_base = OTHER; note = 2'-O-methylcytidine-3'-phosphate
  modified_base 15: mod_base = OTHER; note = 2'-O-methyladenosine-3'-phosphate
  modified_base 16: mod_base = OTHER; note = 2'-O-methylguanosine-3'-phosphate
  modified_base 17: mod_base = OTHER; note = 2'-O-methyladenosine-3'-phosphate
  modified_base 18: mod_base = OTHER; note = 2'-O-methyluridine-3'-phosphate
  modified_base 19: mod_base = OTHER; note = 2'-O-methylcytidine-3'-phosphorothioate
  modified_base 20: mod_base = OTHER; note = 2'-O-methylcytidine-3'-phosphorothioate
  modified_base 21: mod_base = OTHER; note = 2'-O-methyladenosine
agatgagggcatgcagatcca

SEQ ID NO: 723 - RNA, 21 nt, synthetic construct
  source 1..21: mol_type = other RNA
  modified_base 1: mod_base = OTHER; note = 2'-O-methylcytidine-3'-phosphorothioate
  modified_base 2: mod_base = OTHER; note = 2'-O-methyluridine-3'-phosphorothioate
  modified_base 3: mod_base = OTHER; note = 2'-O-methylguanosine-3'-phosphate
  modified_base 4: mod_base = OTHER; note = 2'-O-methylcytidine-3'-phosphate
  modified_base 5: mod_base = OTHER; note = 2'-O-methyluridine-3'-phosphate
  modified_base 6: mod_base = OTHER; note = 2'-O-methylcytidine-3'-phosphate
  modified_base 7: mod_base = OTHER; note = 2'-O-methyladenosine-3'-phosphate
  modified_base 8: mod_base = OTHER; note = 2'-O-methyluridine-3'-phosphate
  modified_base 9: mod_base = OTHER; note = 2'-deoxy-2'-fluorocytidine-3'-phosphate
  modified_base 10: mod_base = OTHER; note = 2'-deoxy-2'-fluorocytidine-3'-phosphate
  modified_base 11: mod_base = OTHER; note = 2'-deoxy-2'-fluorocytidine-3'-phosphate
  modified_base 12: mod_base = OTHER; note = 2'-O-methyladenosine-3'-phosphate
  modified_base 13: mod_base = OTHER; note = 2'-O-methylcytidine-3'-phosphate
  modified_base 14: mod_base = OTHER; note = 2'-O-methyluridine-3'-phosphate
  modified_base 15: mod_base = OTHER; note = 2'-O-methyladenosine-3'-phosphate
  modified_base 16: mod_base = OTHER; note = 2'-O-methyladenosine-3'-phosphate
  modified_base 17: mod_base = OTHER; note = 2'-O-methyluridine-3'-phosphate
  modified_base 18: mod_base = OTHER; note = 2'-O-methylguanosine-3'-phosphate
  modified_base 19: mod_base = OTHER; note = 2'-O-methyluridine-3'-phosphorothioate
  modified_base 20: mod_base = OTHER; note = 2'-O-methylcytidine-3'-phosphorothioate
  modified_base 21: mod_base = OTHER; note = 2'-O-methyladenosine
ctgctcatcccactaatgtca

SEQ ID NO: 724 - RNA, 21 nt, synthetic construct
  source 1..21: mol_type = other RNA
  modified_base 1: mod_base = OTHER; note = 2'-O-methyladenosine-3'-phosphorothioate
  modified_base 2: mod_base = OTHER; note = 2'-O-methylcytidine-3'-phosphorothioate
  modified_base 3: mod_base = OTHER; note = 2'-O-methylcytidine-3'-phosphate
  modified_base 4: mod_base = OTHER; note = 2'-O-methyladenosine-3'-phosphate
  modified_base 5: mod_base = OTHER; note = 2'-O-methyluridine-3'-phosphate
  modified_base 6: mod_base = OTHER; note = 2'-O-methylcytidine-3'-phosphate
  modified_base 7: mod_base = OTHER; note = 2'-deoxy-2'-fluoroadenosine-3'-phosphate
  modified_base 8: mod_base = OTHER; note = 2'-O-methylcytidine-3'-phosphate
  modified_base 9: mod_base = OTHER; note = 2'-deoxy-2'-fluoroadenosine-3'-phosphate
  modified_base 10: mod_base = OTHER; note = 2'-deoxy-2'-fluoroguanosine-3'-phosphate
  modified_base 11: mod_base = OTHER; note = 2'-deoxy-2'-fluoroadenosine-3'-phosphate
  modified_base 12: mod_base = OTHER; note = 2'-O-methyluridine-3'-phosphate
  modified_base 13: mod_base = OTHER; note = 2'-O-methylguanosine-3'-phosphate
  modified_base 14: mod_base = OTHER; note = 2'-O-methylcytidine-3'-phosphate
  modified_base 15: mod_base = OTHER; note = 2'-O-methyluridine-3'-phosphate
  modified_base 16: mod_base = OTHER; note = 2'-O-methylguanosine-3'-phosphate
  modified_base 17: mod_base = OTHER; note = 2'-O-methyladenosine-3'-phosphate
  modified_base 18: mod_base = OTHER; note = 2'-O-methyladenosine-3'-phosphate
  modified_base 19: mod_base = OTHER; note = 2'-O-methyladenosine-3'-phosphorothioate
  modified_base 20: mod_base = OTHER; note = 2'-O-methylcytidine-3'-phosphorothioate
  modified_base 21: mod_base = OTHER; note = 2'-O-methyladenosine
accatcacagatgctgaaaca

SEQ ID NO: 725 - RNA, 21 nt, synthetic construct
  source 1..21: mol_type = other RNA
  modified_base 1: mod_base = OTHER; note = 2'-O-methylcytidine-3'-phosphorothioate
  modified_base 2: mod_base = OTHER; note = 2'-O-methyladenosine-3'-phosphorothioate
  modified_base 3: mod_base = OTHER; note = 2'-O-methyluridine-3'-phosphate
  modified_base 4: mod_base = OTHER; note = 2'-O-methylcytidine-3'-phosphate
  modified_base 5: mod_base = OTHER; note = 2'-O-methyladenosine-3'-phosphate
  modified_base 6: mod_base = OTHER; note = 2'-O-methylcytidine-3'-phosphate
  modified_base 7: mod_base = OTHER; note = 2'-deoxy-2'-fluoroadenosine-3'-phosphate
  modified_base 8: mod_base = OTHER; note = 2'-O-methylguanosine-3'-phosphate
  modified_base 9: mod_base = OTHER; note = 2'-deoxy-2'-fluoroadenosine-3'-phosphate
  modified_base 10: mod_base = OTHER; note = 2'-deoxy-2'-fluorouridine-3'-phosphate
  modified_base 11: mod_base = OTHER; note = 2'-deoxy-2'-fluoroguanosine-3'-phosphate
  modified_base 12: mod_base = OTHER; note = 2'-O-methylcytidine-3'-phosphate
  modified_base 13: mod_base = OTHER; note = 2'-O-methyluridine-3'-phosphate
  modified_base 14: mod_base = OTHER; note = 2'-O-methylguanosine-3'-phosphate
  modified_base 15: mod_base = OTHER; note = 2'-O-methyladenosine-3'-phosphate
  modified_base 16: mod_base = OTHER; note = 2'-O-methyladenosine-3'-phosphate
  modified_base 17: mod_base = OTHER; note = 2'-O-methyladenosine-3'-phosphate
  modified_base 18: mod_base = OTHER; note = 2'-O-methylcytidine-3'-phosphate
  modified_base 19: mod_base = OTHER; note = 2'-O-methyladenosine-3'-phosphorothioate
  modified_base 20: mod_base = OTHER; note = 2'-O-methyluridine-3'-phosphorothioate
  modified_base 21: mod_base = OTHER; note = 2'-O-methyladenosine
catcacagatgctgaaacata

SEQ ID NO: 726 - RNA, 21 nt, synthetic construct
  source 1..21: mol_type = other RNA
  modified_base 1: mod_base = OTHER; note = 2'-O-methylcytidine-3'-phosphorothioate
  modified_base 2: mod_base = OTHER; note = 2'-O-methyladenosine-3'-phosphorothioate
  modified_base 3: mod_base = OTHER; note = 2'-O-methyluridine-3'-phosphate
  modified_base 4: mod_base = OTHER; note = 2'-O-methylcytidine-3'-phosphate
  modified_base 5: mod_base = OTHER; note = 2'-O-methyladenosine-3'-phosphate
  modified_base 6: mod_base = OTHER; note = 2'-O-methylcytidine-3'-phosphate
  modified_base 7: mod_base = OTHER; note = 2'-O-methyladenosine-3'-phosphate
  modified_base 8: mod_base = OTHER; note = 2'-O-methylguanosine-3'-phosphate
  modified_base 9: mod_base = OTHER; note = 2'-deoxy-2'-fluoroadenosine-3'-phosphate
  modified_base 10: mod_base = OTHER; note = 2'-deoxy-2'-fluorouridine-3'-phosphate
  modified_base 11: mod_base = OTHER; note = 2'-deoxy-2'-fluoroguanosine-3'-phosphate
  modified_base 12: mod_base = OTHER; note = 2'-O-methylcytidine-3'-phosphate
  modified_base 13: mod_base = OTHER; note = 2'-O-methyluridine-3'-phosphate
  modified_base 14: mod_base = OTHER; note = 2'-O-methylguanosine-3'-phosphate
  modified_base 15: mod_base = OTHER; note = 2'-O-methyladenosine-3'-phosphate
  modified_base 16: mod_base = OTHER; note = 2'-O-methyladenosine-3'-phosphate
  modified_base 17: mod_base = OTHER; note = 2'-O-methyladenosine-3'-phosphate
  modified_base 18: mod_base = OTHER; note = 2'-O-methylcytidine-3'-phosphate
  modified_base 19: mod_base = OTHER; note = 2'-O-methyladenosine-3'-phosphorothioate
  modified_base 20: mod_base = OTHER; note = 2'-O-methyluridine-3'-phosphorothioate
  modified_base 21: mod_base = OTHER; note = 2'-O-methyladenosine
catcacagatgctgaaacata

SEQ ID NO: 727 - RNA, 21 nt, synthetic construct
  source 1..21: mol_type = other RNA
  modified_base 1: mod_base = OTHER; note = 2'-O-methyladenosine-3'-phosphorothioate
  modified_base 2: mod_base = OTHER; note = 2'-O-methyluridine-3'-phosphorothioate
  modified_base 3: mod_base = OTHER; note = 2'-O-methylguanosine-3'-phosphate
  modified_base 4: mod_base = OTHER; note = 2'-O-methylcytidine-3'-phosphate
  modified_base 5: mod_base = OTHER; note = 2'-O-methyluridine-3'-phosphate
  modified_base 6: mod_base = OTHER; note = 2'-O-methylguanosine-3'-phosphate
  modified_base 7: mod_base = OTHER; note = 2'-deoxy-2'-fluoroadenosine-3'-phosphate
  modified_base 8: mod_base = OTHER; note = 2'-O-methyladenosine-3'-phosphate
  modified_base 9: mod_base = OTHER; note = 2'-deoxy-2'-fluoroadenosine-3'-phosphate
  modified_base 10: mod_base = OTHER; note = 2'-deoxy-2'-fluorocytidine-3'-phosphate
  modified_base 11: mod_base = OTHER; note = 2'-deoxy-2'-fluoroadenosine-3'-phosphate
  modified_base 12: mod_base = OTHER; note = 2'-O-methyluridine-3'-phosphate
  modified_base 13: mod_base = OTHER; note = 2'-O-methylguanosine-3'-phosphate
  modified_base 14: mod_base = OTHER; note = 2'-O-methylcytidine-3'-phosphate
  modified_base 15: mod_base = OTHER; note = 2'-O-methyladenosine-3'-phosphate
  modified_base 16: mod_base = OTHER; note = 2'-O-methylguanosine-3'-phosphate
  modified_base 17: mod_base = OTHER; note = 2'-O-methyluridine-3'-phosphate
  modified_base 18: mod_base = OTHER; note = 2'-O-methyluridine-3'-phosphate
  modified_base 19: mod_base = OTHER; note = 2'-O-methylguanosine-3'-phosphorothioate
  modified_base 20: mod_base = OTHER; note = 2'-O-methyluridine-3'-phosphorothioate
  modified_base 21: mod_base = OTHER; note = 2'-O-methyladenosine
atgctgaaacatgcagttgta

SEQ ID NO: 728 - RNA, 21 nt, synthetic construct
  source 1..21: mol_type = other RNA
  modified_base 1: mod_base = OTHER; note = 2'-O-methyladenosine-3'-phosphorothioate
  modified_base 2: mod_base = OTHER; note = 2'-O-methyluridine-3'-phosphorothioate
  modified_base 3: mod_base = OTHER; note = 2'-O-methylguanosine-3'-phosphate
  modified_base 4: mod_base = OTHER; note = 2'-O-methylcytidine-3'-phosphate
  modified_base 5: mod_base = OTHER; note = 2'-O-methyluridine-3'-phosphate
  modified_base 6: mod_base = OTHER; note = 2'-O-methylguanosine-3'-phosphate
  modified_base 7: mod_base = OTHER; note = 2'-O-methyladenosine-3'-phosphate
  modified_base 8: mod_base = OTHER; note = 2'-O-methyladenosine-3'-phosphate
  modified_base 9: mod_base = OTHER; note = 2'-deoxy-2'-fluoroadenosine-3'-phosphate
  modified_base 10: mod_base = OTHER; note = 2'-deoxy-2'-fluorocytidine-3'-phosphate
  modified_base 11: mod_base = OTHER; note = 2'-deoxy-2'-fluoroadenosine-3'-phosphate
  modified_base 12: mod_base = OTHER; note = 2'-O-methyluridine-3'-phosphate
  modified_base 13: mod_base = OTHER; note = 2'-O-methylguanosine-3'-phosphate
  modified_base 14: mod_base = OTHER; note = 2'-O-methylcytidine-3'-phosphate
  modified_base 15: mod_base = OTHER; note = 2'-O-methyladenosine-3'-phosphate
  modified_base 16: mod_base = OTHER; note = 2'-O-methylguanosine-3'-phosphate
  modified_base 17: mod_base = OTHER; note = 2'-O-methyluridine-3'-phosphate
  modified_base 18: mod_base = OTHER; note = 2'-O-methyluridine-3'-phosphate
  modified_base 19: mod_base = OTHER; note = 2'-O-methylguanosine-3'-phosphorothioate
  modified_base 20: mod_base = OTHER; note = 2'-O-methyluridine-3'-phosphorothioate
  modified_base 21: mod_base = OTHER; note = 2'-O-methyladenosine
atgctgaaacatgcagttgta

SEQ ID NO: 729 - RNA, 21 nt, synthetic construct
  source 1..21: mol_type = other RNA
  modified_base 1: mod_base = OTHER; note = 2'-O-methyladenosine-3'-phosphorothioate
  modified_base 2: mod_base = OTHER; note = 2'-O-methylcytidine-3'-phosphorothioate
  modified_base 3: mod_base = OTHER; note = 2'-O-methyladenosine-3'-phosphate
  modified_base 4: mod_base = OTHER; note = 2'-O-methyluridine-3'-phosphate
  modified_base 5: mod_base = OTHER; note = 2'-O-methylguanosine-3'-phosphate
  modified_base 6: mod_base = OTHER; note = 2'-O-methylcytidine-3'-phosphate
  modified_base 7: mod_base = OTHER; note = 2'-deoxy-2'-fluoroadenosine-3'-phosphate
  modified_base 8: mod_base = OTHER; note = 2'-O-methylguanosine-3'-phosphate
  modified_base 9: mod_base = OTHER; note = 2'-deoxy-2'-fluorouridine-3'-phosphate
  modified_base 10: mod_base = OTHER; note = 2'-deoxy-2'-fluorouridine-3'-phosphate
  modified_base 11: mod_base = OTHER; note = 2'-deoxy-2'-fluoroguanosine-3'-phosphate
  modified_base 12: mod_base = OTHER; note = 2'-O-methyluridine-3'-phosphate
  modified_base 13: mod_base = OTHER; note = 2'-O-methyladenosine-3'-phosphate
  modified_base 14: mod_base = OTHER; note = 2'-O-methyladenosine-3'-phosphate
  modified_base 15: mod_base = OTHER; note = 2'-O-methyladenosine-3'-phosphate
  modified_base 16: mod_base = OTHER; note = 2'-O-methylcytidine-3'-phosphate
  modified_base 17: mod_base = OTHER; note = 2'-O-methyluridine-3'-phosphate
  modified_base 18: mod_base = OTHER; note = 2'-O-methyluridine-3'-phosphate
  modified_base 19: mod_base = OTHER; note = 2'-O-methylguanosine-3'-phosphorothioate
  modified_base 20: mod_base = OTHER; note = 2'-O-methyladenosine-3'-phosphorothioate
  modified_base 21: mod_base = OTHER; note = 2'-O-methyladenosine
acatgcagttgtaaacttgaa

SEQ ID NO: 730 - RNA, 21 nt, synthetic construct
  source 1..21: mol_type = other RNA
  modified_base 1: mod_base = OTHER; note = 2'-O-methyladenosine-3'-phosphorothioate
  modified_base 2: mod_base = OTHER; note = 2'-O-methyluridine-3'-phosphorothioate
  modified_base 3: mod_base = OTHER; note = 2'-O-methylguanosine-3'-phosphate
  modified_base 4: mod_base = OTHER; note = 2'-O-methylcytidine-3'-phosphate
  modified_base 5: mod_base = OTHER; note = 2'-O-methyladenosine-3'-phosphate
  modified_base 6: mod_base = OTHER; note = 2'-O-methylguanosine-3'-phosphate
  modified_base 7: mod_base = OTHER; note = 2'-deoxy-2'-fluorouridine-3'-phosphate
  modified_base 8: mod_base = OTHER; note = 2'-O-methyluridine-3'-phosphate
  modified_base 9: mod_base = OTHER; note = 2'-deoxy-2'-fluoroguanosine-3'-phosphate
  modified_base 10: mod_base = OTHER; note = 2'-deoxy-2'-fluorouridine-3'-phosphate
  modified_base 11: mod_base = OTHER; note = 2'-deoxy-2'-fluoroadenosine-3'-phosphate
  modified_base 12: mod_base = OTHER; note = 2'-O-methyladenosine-3'-phosphate
  modified_base 13: mod_base = OTHER; note = 2'-O-methyladenosine-3'-phosphate
  modified_base 14: mod_base = OTHER; note = 2'-O-methylcytidine-3'-phosphate
  modified_base 15: mod_base = OTHER; note = 2'-O-methyluridine-3'-phosphate
  modified_base 16: mod_base = OTHER; note = 2'-O-methyluridine-3'-phosphate
  modified_base 17: mod_base = OTHER; note = 2'-O-methylguanosine-3'-phosphate
  modified_base 18: mod_base = OTHER; note = 2'-O-methyladenosine-3'-phosphate
  modified_base 19: mod_base = OTHER; note = 2'-O-methyluridine-3'-phosphorothioate
  modified_base 20: mod_base = OTHER; note = 2'-O-methyluridine-3'-phosphorothioate
  modified_base 21: mod_base = OTHER; note = 2'-O-methyladenosine
atgcagttgtaaacttgatta

SEQ ID NO: 731 - RNA, 21 nt, synthetic construct
  source 1..21: mol_type = other RNA
  modified_base 1: mod_base = OTHER; note = 2'-O-methyladenosine-3'-phosphorothioate
  modified_base 2: mod_base = OTHER; note = 2'-O-methyluridine-3'-phosphorothioate
  modified_base 3: mod_base = OTHER; note = 2'-O-methylguanosine-3'-phosphate
  modified_base 4: mod_base = OTHER; note = 2'-O-methylcytidine-3'-phosphate
  modified_base 5: mod_base = OTHER; note = 2'-O-methyladenosine-3'-phosphate
  modified_base 6: mod_base = OTHER; note = 2'-O-methylguanosine-3'-phosphate
  modified_base 7: mod_base = OTHER; note = 2'-O-methyluridine-3'-phosphate
  modified_base 8: mod_base = OTHER; note = 2'-O-methyluridine-3'-phosphate
  modified_base 9: mod_base = OTHER; note = 2'-deoxy-2'-fluoroguanosine-3'-phosphate
  modified_base 10: mod_base = OTHER; note = 2'-deoxy-2'-fluorouridine-3'-phosphate
  modified_base 11: mod_base = OTHER; note = 2'-deoxy-2'-fluoroadenosine-3'-phosphate
  modified_base 12: mod_base = OTHER; note = 2'-O-methyladenosine-3'-phosphate
  modified_base 13: mod_base = OTHER; note = 2'-O-methyladenosine-3'-phosphate
  modified_base 14: mod_base = OTHER; note = 2'-O-methylcytidine-3'-phosphate
  modified_base 15: mod_base = OTHER; note = 2'-O-methyluridine-3'-phosphate
  modified_base 16: mod_base = OTHER; note = 2'-O-methyluridine-3'-phosphate
  modified_base 17: mod_base = OTHER; note = 2'-O-methylguanosine-3'-phosphate
  modified_base 18: mod_base = OTHER; note = 2'-O-methyladenosine-3'-phosphate
  modified_base 19: mod_base = OTHER; note = 2'-O-methyluridine-3'-phosphorothioate
  modified_base 20: mod_base = OTHER; note = 2'-O-methyluridine-3'-phosphorothioate
  modified_base 21: mod_base = OTHER; note = 2'-O-methyladenosine
atgcagttgtaaacttgatta

SEQ ID NO: 732 - RNA, 21 nt, synthetic construct
  source 1..21: mol_type = other RNA
  modified_base 1: mod_base = OTHER; note = 2'-O-methyladenosine-3'-phosphorothioate
  modified_base 2: mod_base = OTHER; note = 2'-O-methylcytidine-3'-phosphorothioate
  modified_base 3: mod_base = OTHER; note = 2'-O-methylguanosine-3'-phosphate
  modified_base 4: mod_base = OTHER; note = 2'-O-methyluridine-3'-phosphate
  modified_base 5: mod_base = OTHER; note = 2'-O-methylguanosine-3'-phosphate
  modified_base 6: mod_base = OTHER; note = 2'-O-methylcytidine-3'-phosphate
  modified_base 7: mod_base = OTHER; note = 2'-deoxy-2'-fluoroadenosine-3'-phosphate
  modified_base 8: mod_base = OTHER; note = 2'-O-methyladenosine-3'-phosphate
  modified_base 9: mod_base = OTHER; note = 2'-deoxy-2'-fluorouridine-3'-phosphate
  modified_base 10: mod_base = OTHER; note = 2'-deoxy-2'-fluorocytidine-3'-phosphate
  modified_base 11: mod_base = OTHER; note = 2'-deoxy-2'-fluorocytidine-3'-phosphate
  modified_base 12: mod_base = OTHER; note = 2'-O-methylcytidine-3'-phosphate
  modified_base 13: mod_base = OTHER; note = 2'-O-methyluridine-3'-phosphate
  modified_base 14: mod_base = OTHER; note = 2'-O-methylguanosine-3'-phosphate
  modified_base 15: mod_base = OTHER; note = 2'-O-methyladenosine-3'-phosphate
  modified_base 16: mod_base = OTHER; note = 2'-O-methyladenosine-3'-phosphate
  modified_base 17: mod_base = OTHER; note = 2'-O-methylcytidine-3'-phosphate
  modified_base 18: mod_base = OTHER; note = 2'-O-methyluridine-3'-phosphate
  modified_base 19: mod_base = OTHER; note = 2'-O-methylguanosine-3'-phosphorothioate
  modified_base 20: mod_base = OTHER; note = 2'-O-methyladenosine-3'-phosphorothioate
  modified_base 21: mod_base = OTHER; note = 2'-O-methyladenosine
acgtgcaatccctgaactgaa

SEQ ID NO: 733 - RNA, 21 nt, synthetic construct
  source 1..21: mol_type = other RNA
  modified_base 1: mod_base = OTHER; note = 2'-O-methyluridine-3'-phosphorothioate
  modified_base 2: mod_base = OTHER; note = 2'-O-methylguanosine-3'-phosphorothioate
  modified_base 3: mod_base = OTHER; note = 2'-O-methylcytidine-3'-phosphate
  modified_base 4: mod_base = OTHER; note = 2'-O-methyladenosine-3'-phosphate
  modified_base 5: mod_base = OTHER; note = 2'-O-methyladenosine-3'-phosphate
  modified_base 6: mod_base = OTHER; note = 2'-O-methyluridine-3'-phosphate
  modified_base 7: mod_base = OTHER; note = 2'-deoxy-2'-fluorocytidine-3'-phosphate
  modified_base 8: mod_base = OTHER; note = 2'-O-methylcytidine-3'-phosphate
  modified_base 9: mod_base = OTHER; note = 2'-deoxy-2'-fluorocytidine-3'-phosphate
  modified_base 10: mod_base = OTHER; note = 2'-deoxy-2'-fluorouridine-3'-phosphate
  modified_base 11: mod_base = OTHER; note = 2'-deoxy-2'-fluoroguanosine-3'-phosphate
  modified_base 12: mod_base = OTHER; note = 2'-O-methyladenosine-3'-phosphate
  modified_base 13: mod_base = OTHER; note = 2'-O-methyladenosine-3'-phosphate
  modified_base 14: mod_base = OTHER; note = 2'-O-methylcytidine-3'-phosphate
  modified_base 15: mod_base = OTHER; note = 2'-O-methyluridine-3'-phosphate
  modified_base 16: mod_base = OTHER; note = 2'-O-methylguanosine-3'-phosphate
  modified_base 17: mod_base = OTHER; note = 2'-O-methyladenosine-3'-phosphate
  modified_base 18: mod_base = OTHER; note = 2'-O-methylcytidine-3'-phosphate
  modified_base 19: mod_base = OTHER; note = 2'-O-methyladenosine-3'-phosphorothioate
  modified_base 20: mod_base = OTHER; note = 2'-O-methyladenosine-3'-phosphorothioate
  modified_base 21: mod_base = OTHER; note = 2'-O-methyladenosine
tgcaatccctgaactgacaaa

SEQ ID NO: 734 - RNA, 21 nt, synthetic construct
  source 1..21: mol_type = other RNA
  modified_base 1: mod_base = OTHER; note = 2'-O-methylguanosine-3'-phosphorothioate
  modified_base 2: mod_base = OTHER; note = 2'-O-methyladenosine-3'-phosphorothioate
  modified_base 3: mod_base = OTHER; note = 2'-O-methylcytidine-3'-phosphate
  modified_base 4: mod_base = OTHER; note = 2'-O-methylcytidine-3'-phosphate
  modified_base 5: mod_base = OTHER; note = 2'-O-methyladenosine-3'-phosphate
  modified_base 6: mod_base = OTHER; note = 2'-O-methylguanosine-3'-phosphate
  modified_base 7: mod_base = OTHER; note = 2'-deoxy-2'-fluoroguanosine-3'-phosphate
  modified_base 8: mod_base = OTHER; note = 2'-O-methyluridine-3'-phosphate
  modified_base 9: mod_base = OTHER; note = 2'-deoxy-2'-fluoroguanosine-3'-phosphate
  modified_base 10: mod_base = OTHER; note = 2'-deoxy-2'-fluoroguanosine-3'-phosphate
  modified_base 11: mod_base = OTHER; note = 2'-deoxy-2'-fluorouridine-3'-phosphate
  modified_base 12: mod_base = OTHER; note = 2'-O-methylguanosine-3'-phosphate
  modified_base 13: mod_base = OTHER; note = 2'-O-methylguanosine-3'-phosphate
  modified_base 14: mod_base = OTHER; note = 2'-O-methyluridine-3'-phosphate
  modified_base 15: mod_base = OTHER; note = 2'-O-methyluridine-3'-phosphate
  modified_base 16: mod_base = OTHER; note = 2'-O-methyladenosine-3'-phosphate
  modified_base 17: mod_base = OTHER; note = 2'-O-methyladenosine-3'-phosphate
  modified_base 18: mod_base = OTHER; note = 2'-O-methyluridine-3'-phosphate
  modified_base 19: mod_base = OTHER; note = 2'-O-methyladenosine-3'-phosphorothioate
  modified_base 20: mod_base = OTHER; note = 2'-O-methyladenosine-3'-phosphorothioate
  modified_base 21: mod_base = OTHER; note = 2'-O-methyladenosine
gaccaggtggtggttaataaa

SEQ ID NO: 735 - RNA, 21 nt, synthetic construct
  source 1..21: mol_type = other RNA
  modified_base 1: mod_base = OTHER; note = 2'-O-methylguanosine-3'-phosphorothioate
  modified_base 2: mod_base = OTHER; note = 2'-O-methyladenosine-3'-phosphorothioate
  modified_base 3: mod_base = OTHER; note = 2'-O-methylcytidine-3'-phosphate
  modified_base 4: mod_base = OTHER; note = 2'-O-methylcytidine-3'-phosphate
  modified_base 5: mod_base = OTHER; note = 2'-O-methyladenosine-3'-phosphate
  modified_base 6: mod_base = OTHER; note = 2'-O-methylguanosine-3'-phosphate
  modified_base 7: mod_base = OTHER; note = 2'-O-methylguanosine-3'-phosphate
  modified_base 8: mod_base = OTHER; note = 2'-O-methyluridine-3'-phosphate
  modified_base 9: mod_base = OTHER; note = 2'-deoxy-2'-fluoroguanosine-3'-phosphate
  modified_base 10: mod_base = OTHER; note = 2'-deoxy-2'-fluoroguanosine-3'-phosphate
  modified_base 11: mod_base = OTHER; note = 2'-deoxy-2'-fluorouridine-3'-phosphate
  modified_base 12: mod_base = OTHER; note = 2'-O-methylguanosine-3'-phosphate
  modified_base 13: mod_base = OTHER; note = 2'-O-methylguanosine-3'-phosphate
  modified_base 14: mod_base = OTHER; note = 2'-O-methyluridine-3'-phosphate
  modified_base 15: mod_base = OTHER; note = 2'-O-methyluridine-3'-phosphate
  modified_base 16: mod_base = OTHER; note = 2'-O-methyladenosine-3'-phosphate
  modified_base 17: mod_base = OTHER; note = 2'-O-methyladenosine-3'-phosphate
  modified_base 18: mod_base = OTHER; note = 2'-O-methyluridine-3'-phosphate
  modified_base 19: mod_base = OTHER; note = 2'-O-methyladenosine-3'-phosphorothioate
  modified_base 20: mod_base = OTHER; note = 2'-O-methyladenosine-3'-phosphorothioate
  modified_base 21: mod_base = OTHER; note = 2'-O-methyladenosine
gaccaggtggtggttaataaa

SEQ ID NO: 736 - RNA, 21 nt, synthetic construct
  source 1..21: mol_type = other RNA
  modified_base 1: mod_base = OTHER; note = 2'-O-methylcytidine-3'-phosphorothioate
  modified_base 2: mod_base = OTHER; note = 2'-O-methylcytidine-3'-phosphorothioate
  modified_base 3: mod_base = OTHER; note = 2'-O-methyladenosine-3'-phosphate
  modified_base 4: mod_base = OTHER; note = 2'-O-methylguanosine-3'-phosphate
  modified_base 5: mod_base = OTHER; note = 2'-O-methylguanosine-3'-phosphate
  modified_base 6: mod_base = OTHER; note = 2'-O-methyluridine-3'-phosphate
  modified_base 7: mod_base = OTHER; note = 2'-O-methylguanosine-3'-phosphate
  modified_base 8: mod_base = OTHER; note = 2'-O-methylguanosine-3'-phosphate
  modified_base 9: mod_base = OTHER; note = 2'-deoxy-2'-fluorouridine-3'-phosphate
  modified_base 10: mod_base = OTHER; note = 2'-deoxy-2'-fluoroguanosine-3'-phosphate
  modified_base 11: mod_base = OTHER; note = 2'-deoxy-2'-fluoroguanosine-3'-phosphate
  modified_base 12: mod_base = OTHER; note = 2'-O-methyluridine-3'-phosphate
  modified_base 13: mod_base = OTHER; note = 2'-O-methyluridine-3'-phosphate
  modified_base 14: mod_base = OTHER; note = 2'-O-methyladenosine-3'-phosphate
  modified_base 15: mod_base = OTHER; note = 2'-O-methyladenosine-3'-phosphate
  modified_base 16: mod_base = OTHER; note = 2'-O-methyluridine-3'-phosphate
  modified_base 17: mod_base = OTHER; note = 2'-O-methyladenosine-3'-phosphate
  modified_base 18: mod_base = OTHER; note = 2'-O-methyladenosine-3'-phosphate
  modified_base 19: mod_base = OTHER; note = 2'-O-methylguanosine-3'-phosphorothioate
  modified_base 20: mod_base = OTHER; note = 2'-O-methylguanosine-3'-phosphorothioate
  modified_base 21: mod_base = OTHER; note = 2'-O-methyladenosine
ccaggtggtggttaataagga

SEQ ID NO: 737 - RNA, 21 nt, synthetic construct
  source 1..21: mol_type = other RNA
  modified_base 1: mod_base = OTHER; note = 2'-O-methylguanosine-3'-phosphorothioate
  modified_base 2: mod_base = OTHER; note = 2'-O-methyluridine-3'-phosphorothioate
  modified_base 3: mod_base = OTHER; note = 2'-O-methyluridine-3'-phosphate
  modified_base 4: mod_base = OTHER; note = 2'-O-methyladenosine-3'-phosphate
  modified_base 5: mod_base = OTHER; note = 2'-O-methyladenosine-3'-phosphate
  modified_base 6: mod_base = OTHER; note = 2'-O-methyluridine-3'-phosphate
  modified_base 7: mod_base = OTHER; note = 2'-deoxy-2'-fluoroadenosine-3'-phosphate
  modified_base 8: mod_base = OTHER; note = 2'-O-methyladenosine-3'-phosphate
  modified_base 9: mod_base = OTHER; note = 2'-deoxy-2'-fluoroguanosine-3'-phosphate
  modified_base 10: mod_base = OTHER; note = 2'-deoxy-2'-fluoroguanosine-3'-phosphate
  modified_base 11: mod_base = OTHER; note = 2'-deoxy-2'-fluorocytidine-3'-phosphate
  modified_base 12: mod_base = OTHER; note = 2'-O-methyluridine-3'-phosphate
  modified_base 13: mod_base = OTHER; note = 2'-O-methylguanosine-3'-phosphate
  modified_base 14: mod_base = OTHER; note = 2'-O-methylcytidine-3'-phosphate
  modified_base 15: mod_base = OTHER; note = 2'-O-methyladenosine-3'-phosphate
  modified_base 16: mod_base = OTHER; note = 2'-O-methylguanosine-3'-phosphate
  modified_base 17: mod_base = OTHER; note = 2'-O-methyluridine-3'-phosphate
  modified_base 18: mod_base = OTHER; note = 2'-O-methyluridine-3'-phosphate
  modified_base 19: mod_base = OTHER; note = 2'-O-methyladenosine-3'-phosphorothioate
  modified_base 20: mod_base = OTHER; note = 2'-O-methyluridine-3'-phosphorothioate
  modified_base 21: mod_base = OTHER; note = 2'-O-methyladenosine
gttaataaggctgcagttata

SEQ ID NO: 738 - RNA, 21 nt, synthetic construct
  source 1..21: mol_type = other RNA
  modified_base 1: mod_base = OTHER; note = 2'-O-methylcytidine-3'-phosphorothioate
  modified_base 2: mod_base = OTHER; note = 2'-O-methylcytidine-3'-phosphorothioate
  modified_base 3: mod_base = OTHER; note = 2'-O-methyluridine-3'-phosphate
  modified_base 4: mod_base = OTHER; note = 2'-O-methylcytidine-3'-phosphate
  modified_base 5: mod_base = OTHER; note = 2'-O-methyladenosine-3'-phosphate
  modified_base 6: mod_base = OTHER; note = 2'-O-methylguanosine-3'-phosphate
  modified_base 7: mod_base = OTHER; note = 2'-deoxy-2'-fluoroadenosine-3'-phosphate
  modified_base 8: mod_base = OTHER; note = 2'-O-methyluridine-3'-phosphate
  modified_base 9: mod_base = OTHER; note = 2'-deoxy-2'-fluoroguanosine-3'-phosphate
  modified_base 10: mod_base = OTHER; note = 2'-deoxy-2'-fluoroguanosine-3'-phosphate
  modified_base 11: mod_base = OTHER; note = 2'-deoxy-2'-fluorouridine-3'-phosphate
  modified_base 12: mod_base = OTHER; note = 2'-O-methylguanosine-3'-phosphate
  modified_base 13: mod_base = OTHER; note = 2'-O-methyluridine-3'-phosphate
  modified_base 14: mod_base = OTHER; note = 2'-O-methylcytidine-3'-phosphate
  modified_base 15: mod_base = OTHER; note = 2'-O-methyluridine-3'-phosphate
  modified_base 16: mod_base = OTHER; note = 2'-O-methylguanosine-3'-phosphate
  modified_base 17: mod_base = OTHER; note = 2'-O-methylcytidine-3'-phosphate
  modified_base 18: mod_base = OTHER; note = 2'-O-methyluridine-3'-phosphate
  modified_base 19: mod_base = OTHER; note = 2'-O-methyladenosine-3'-phosphorothioate
  modified_base 20: mod_base = OTHER; note = 2'-O-methyluridine-3'-phosphorothioate
  modified_base 21: mod_base = OTHER; note = 2'-O-methyladenosine
cctcagatggtgtctgctata

SEQ ID NO: 739 - RNA, 21 nt, synthetic construct
  source 1..21: mol_type = other RNA
  modified_base 1: mod_base = OTHER; note = 2'-O-methyluridine-3'-phosphorothioate
  modified_base 2: mod_base = OTHER; note = 2'-O-methylcytidine-3'-phosphorothioate
  modified_base 3: mod_base = OTHER; note = 2'-O-methyladenosine-3'-phosphate
  modified_base 4: mod_base = OTHER; note = 2'-O-methylguanosine-3'-phosphate
  modified_base 5: mod_base = OTHER; note = 2'-O-methyladenosine-3'-phosphate
  modified_base 6: mod_base = OTHER; note = 2'-O-methyluridine-3'-phosphate
  modified_base 7: mod_base = OTHER; note = 2'-O-methylguanosine-3'-phosphate
  modified_base 8: mod_base = OTHER; note = 2'-O-methylguanosine-3'-phosphate
  modified_base 9: mod_base = OTHER; note = 2'-deoxy-2'-fluorouridine-3'-phosphate
  modified_base 10: mod_base = OTHER; note = 2'-deoxy-2'-fluoroguanosine-3'-phosphate
  modified_base 11: mod_base = OTHER; note = 2'-deoxy-2'-fluorouridine-3'-phosphate
  modified_base 12: mod_base = OTHER; note = 2'-O-methylcytidine-3'-phosphate
  modified_base 13: mod_base = OTHER; note = 2'-O-methyluridine-3'-phosphate
  modified_base 14: mod_base = OTHER; note = 2'-O-methylguanosine-3'-phosphate
  modified_base 15: mod_base = OTHER; note = 2'-O-methylcytidine-3'-phosphate
  modified_base 16: mod_base = OTHER; note = 2'-O-methyluridine-3'-phosphate
  modified_base 17: mod_base = OTHER; note = 2'-O-methyladenosine-3'-phosphate
  modified_base 18: mod_base = OTHER; note = 2'-O-methyluridine-3'-phosphate
  modified_base 19: mod_base = OTHER; note = 2'-O-methyluridine-3'-phosphorothioate
  modified_base 20: mod_base = OTHER; note = 2'-O-methylguanosine-3'-phosphorothioate
  modified_base 21: mod_base = OTHER; note = 2'-O-methyladenosine
tcagatggtgtctgctattga

SEQ ID NO: 740 - RNA, 21 nt, synthetic construct
  source 1..21: mol_type = other RNA
  modified_base 1: mod_base = OTHER; note = 2'-O-methyladenosine-3'-phosphorothioate
  modified_base 2: mod_base = OTHER; note = 2'-O-methylguanosine-3'-phosphorothioate
  modified_base 3: mod_base = OTHER; note = 2'-O-methyladenosine-3'-phosphate
  modified_base 4: mod_base = OTHER; note = 2'-O-methyluridine-3'-phosphate
  modified_base 5: mod_base = OTHER; note = 2'-O-methylguanosine-3'-phosphate
  modified_base 6: mod_base = OTHER; note = 2'-O-methylguanosine-3'-phosphate
  modified_base 7: mod_base = OTHER; note = 2'-deoxy-2'-fluorouridine-3'-phosphate
  modified_base 8: mod_base = OTHER; note = 2'-O-methylguanosine-3'-phosphate
  modified_base 9: mod_base = OTHER; note = 2'-deoxy-2'-fluorouridine-3'-phosphate
  modified_base 10: mod_base = OTHER; note = 2'-deoxy-2'-fluorocytidine-3'-phosphate
  modified_base 11: mod_base = OTHER; note = 2'-deoxy-2'-fluorouridine-3'-phosphate
  modified_base 12: mod_base = OTHER; note = 2'-O-methylguanosine-3'-phosphate
  modified_base 13: mod_base = OTHER; note = 2'-O-methylcytidine-3'-phosphate
  modified_base 14: mod_base = OTHER; note = 2'-O-methyluridine-3'-phosphate
  modified_base 15: mod_base = OTHER; note = 2'-O-methyladenosine-3'-phosphate
  modified_base 16: mod_base = OTHER; note = 2'-O-methyluridine-3'-phosphate
  modified_base 17: mod_base = OTHER; note = 2'-O-methyluridine-3'-phosphate
  modified_base 18: mod_base = OTHER; note = 2'-O-methylguanosine-3'-phosphate
  modified_base 19: mod_base = OTHER; note = 2'-O-methyluridine-3'-phosphorothioate
  modified_base 20: mod_base = OTHER; note = 2'-O-methyladenosine-3'-phosphorothioate
  modified_base 21: mod_base = OTHER; note = 2'-O-methyladenosine
agatggtgtctgctattgtaa

SEQ ID NO: 741 - RNA, 21 nt, synthetic construct
  source 1..21: mol_type = other RNA
  modified_base 1: mod_base = OTHER; note = 2'-O-methyladenosine-3'-phosphorothioate
  modified_base 2: mod_base = OTHER; note = 2'-O-methylguanosine-3'-phosphorothioate
  modified_base 3: mod_base = OTHER; note = 2'-O-methyladenosine-3'-phosphate
  modified_base 4: mod_base = OTHER; note = 2'-O-methyluridine-3'-phosphate
  modified_base 5: mod_base = OTHER; note = 2'-O-methylguanosine-3'-phosphate
  modified_base 6: mod_base = OTHER; note = 2'-O-methylguanosine-3'-phosphate
  modified_base 7: mod_base = OTHER; note = 2'-O-methyluridine-3'-phosphate
  modified_base 8: mod_base = OTHER; note = 2'-O-methylguanosine-3'-phosphate
  modified_base 9: mod_base = OTHER; note = 2'-deoxy-2'-fluorouridine-3'-phosphate
  modified_base 10: mod_base = OTHER; note = 2'-deoxy-2'-fluorocytidine-3'-phosphate
  modified_base 11: mod_base = OTHER; note = 2'-deoxy-2'-fluorouridine-3'-phosphate
  modified_base 12: mod_base = OTHER; note = 2'-O-methylguanosine-3'-phosphate
  modified_base 13: mod_base = OTHER; note = 2'-O-methylcytidine-3'-phosphate
  modified_base 14: mod_base = OTHER; note = 2'-O-methyluridine-3'-phosphate
  modified_base 15: mod_base = OTHER; note = 2'-O-methyladenosine-3'-phosphate
  modified_base 16: mod_base = OTHER; note = 2'-O-methyluridine-3'-phosphate
  modified_base 17: mod_base = OTHER; note = 2'-O-methyluridine-3'-phosphate
  modified_base 18: mod_base = OTHER; note = 2'-O-methylguanosine-3'-phosphate
  modified_base 19: mod_base = OTHER; note = 2'-O-methyluridine-3'-phosphorothioate
  modified_base 20: mod_base = OTHER; note = 2'-O-methyladenosine-3'-phosphorothioate
  modified_base 21: mod_base = OTHER; note = 2'-O-methyladenosine
agatggtgtctgctattgtaa

SEQ ID NO: 742 - RNA, 21 nt, synthetic construct
  source 1..21: mol_type = other RNA
  modified_base 1: mod_base = OTHER; note = 2'-O-methyladenosine-3'-phosphorothioate
  modified_base 2: mod_base = OTHER; note = 2'-O-methylcytidine-3'-phosphorothioate
  modified_base 3: mod_base = OTHER; note = 2'-O-methylguanosine-3'-phosphate
  modified_base 4: mod_base = OTHER; note = 2'-O-methyluridine-3'-phosphate
  modified_base 5: mod_base = OTHER; note = 2'-O-methyladenosine-3'-phosphate
  modified_base 6: mod_base = OTHER; note = 2'-O-methylcytidine-3'-phosphate
  modified_base 7: mod_base = OTHER; note = 2'-deoxy-2'-fluorocytidine-3'-phosphate
  modified_base 8: mod_base = OTHER; note = 2'-O-methyladenosine-3'-phosphate
  modified_base 9: mod_base = OTHER; note = 2'-deoxy-2'-fluorouridine-3'-phosphate
  modified_base 10: mod_base = OTHER; note = 2'-deoxy-2'-fluoroguanosine-3'-phosphate
  modified_base 11: mod_base = OTHER; note = 2'-deoxy-2'-fluorocytidine-3'-phosphate
  modified_base 12: mod_base = OTHER; note = 2'-O-methyladenosine-3'-phosphate
  modified_base 13: mod_base = OTHER; note = 2'-O-methylguanosine-3'-phosphate
  modified_base 14: mod_base = OTHER; note = 2'-O-methyladenosine-3'-phosphate
  modified_base 15: mod_base = OTHER; note = 2'-O-methyladenosine-3'-phosphate
  modified_base 16: mod_base = OTHER; note = 2'-O-methyluridine-3'-phosphate
  modified_base 17: mod_base = OTHER; note = 2'-O-methyladenosine-3'-phosphate
  modified_base 18: mod_base = OTHER; note = 2'-O-methylcytidine-3'-phosphate
  modified_base 19: mod_base = OTHER; note = 2'-O-methyladenosine-3'-phosphorothioate
  modified_base 20: mod_base = OTHER; note = 2'-O-methyladenosine-3'-phosphorothioate
  modified_base 21: mod_base = OTHER; note = 2'-O-methyladenosine
acgtaccatgcagaatacaaa

SEQ ID NO: 743 - RNA, 21 nt, synthetic construct
  source 1..21: mol_type = other RNA
  modified_base 1: mod_base = OTHER; note = 2'-O-methyladenosine-3'-phosphorothioate
  modified_base 2: mod_base = OTHER; note = 2'-O-methylcytidine-3'-phosphorothioate
  modified_base 3: mod_base = OTHER; note = 2'-O-methylguanosine-3'-phosphate
  modified_base 4: mod_base = OTHER; note = 2'-O-methyluridine-3'-phosphate
  modified_base 5: mod_base = OTHER; note = 2'-O-methyladenosine-3'-phosphate
  modified_base 6: mod_base = OTHER; note = 2'-O-methylcytidine-3'-phosphate
  modified_base 7: mod_base = OTHER; note = 2'-O-methylcytidine-3'-phosphate
  modified_base 8: mod_base = OTHER; note = 2'-O-methyladenosine-3'-phosphate
  modified_base 9: mod_base = OTHER; note = 2'-deoxy-2'-fluorouridine-3'-phosphate
  modified_base 10: mod_base = OTHER; note = 2'-deoxy-2'-fluoroguanosine-3'-phosphate
  modified_base 11: mod_base = OTHER; note = 2'-deoxy-2'-fluorocytidine-3'-phosphate
  modified_base 12: mod_base = OTHER; note = 2'-O-methyladenosine-3'-phosphate
  modified_base 13: mod_base = OTHER; note = 2'-O-methylguanosine-3'-phosphate
  modified_base 14: mod_base = OTHER; note = 2'-O-methyladenosine-3'-phosphate
  modified_base 15: mod_base = OTHER; note = 2'-O-methyladenosine-3'-phosphate
  modified_base 16: mod_base = OTHER; note = 2'-O-methyluridine-3'-phosphate
  modified_base 17: mod_base = OTHER; note = 2'-O-methyladenosine-3'-phosphate
  modified_base 18: mod_base = OTHER; note = 2'-O-methylcytidine-3'-phosphate
  modified_base 19: mod_base = OTHER; note = 2'-O-methyladenosine-3'-phosphorothioate
  modified_base 20: mod_base = OTHER; note = 2'-O-methyladenosine-3'-phosphorothioate
  modified_base 21: mod_base = OTHER; note = 2'-O-methyladenosine
acgtaccatgcagaatacaaa

SEQ ID NO: 744 - RNA, 21 nt, synthetic construct
  source 1..21: mol_type = other RNA
  modified_base 1: mod_base = OTHER; note = 2'-O-methylcytidine-3'-phosphorothioate
  modified_base 2: mod_base = OTHER; note = 2'-O-methylguanosine-3'-phosphorothioate
  modified_base 3: mod_base = OTHER; note = 2'-O-methyluridine-3'-phosphate
  modified_base 4: mod_base = OTHER; note = 2'-O-methyladenosine-3'-phosphate
  modified_base 5: mod_base = OTHER; note = 2'-O-methylcytidine-3'-phosphate
  modified_base 6: mod_base = OTHER; note = 2'-O-methylcytidine-3'-phosphate
  modified_base 7: mod_base = OTHER; note = 2'-deoxy-2'-fluoroadenosine-3'-phosphate
  modified_base 8: mod_base = OTHER; note = 2'-O-methyluridine-3'-phosphate
  modified_base 9: mod_base = OTHER; note = 2'-deoxy-2'-fluoroguanosine-3'-phosphate
  modified_base 10: mod_base = OTHER; note = 2'-deoxy-2'-fluorocytidine-3'-phosphate
  modified_base 11: mod_base = OTHER; note = 2'-deoxy-2'-fluoroadenosine-3'-phosphate
  modified_base 12: mod_base = OTHER; note = 2'-O-methylguanosine-3'-phosphate
  modified_base 13: mod_base = OTHER; note = 2'-O-methyladenosine-3'-phosphate
  modified_base 14: mod_base = OTHER; note = 2'-O-methyladenosine-3'-phosphate
  modified_base 15: mod_base = OTHER; note = 2'-O-methyluridine-3'-phosphate
  modified_base 16: mod_base = OTHER; note = 2'-O-methyladenosine-3'-phosphate
  modified_base 17: mod_base = OTHER; note = 2'-O-methylcytidine-3'-phosphate
  modified_base 18: mod_base = OTHER; note = 2'-O-methyladenosine-3'-phosphate
  modified_base 19: mod_base = OTHER; note = 2'-O-methyladenosine-3'-phosphorothioate
  modified_base 20: mod_base = OTHER; note = 2'-O-methyladenosine-3'-phosphorothioate
  modified_base 21: mod_base = OTHER; note = 2'-O-methyladenosine
cgtaccatgcagaatacaaaa

SEQ ID NO: 745 - RNA, 21 nt, synthetic construct
  source 1..21: mol_type = other RNA
  modified_base 1: mod_base = OTHER; note = 2'-O-methylguanosine-3'-phosphorothioate
  modified_base 2: mod_base = OTHER; note = 2'-O-methyluridine-3'-phosphorothioate
  modified_base 3: mod_base = OTHER; note = 2'-O-methyladenosine-3'-phosphate
  modified_base 4: mod_base = OTHER; note = 2'-O-methylcytidine-3'-phosphate
  modified_base 5: mod_base = OTHER; note = 2'-O-methylcytidine-3'-phosphate
  modified_base 6: mod_base = OTHER; note = 2'-O-methyladenosine-3'-phosphate
  modified_base 7: mod_base = OTHER; note = 2'-deoxy-2'-fluorouridine-3'-phosphate
  modified_base 8: mod_base = OTHER; note = 2'-O-methylguanosine-3'-phosphate
  modified_base 9: mod_base = OTHER; note = 2'-deoxy-2'-fluorocytidine-3'-phosphate
  modified_base 10: mod_base = OTHER; note = 2'-deoxy-2'-fluoroadenosine-3'-phosphate
  modified_base 11: mod_base = OTHER; note = 2'-deoxy-2'-fluoroguanosine-3'-phosphate
  modified_base 12: mod_base = OTHER; note = 2'-O-methyladenosine-3'-phosphate
  modified_base 13: mod_base = OTHER; note = 2'-O-methyladenosine-3'-phosphate
  modified_base 14: mod_base = OTHER; note = 2'-O-methyluridine-3'-phosphate
  modified_base 15: mod_base = OTHER; note = 2'-O-methyladenosine-3'-phosphate
  modified_base 16: mod_base = OTHER; note = 2'-O-methylcytidine-3'-phosphate
  modified_base 17: mod_base = OTHER; note = 2'-O-methyladenosine-3'-phosphate
  modified_base 18: mod_base = OTHER; note = 2'-O-methyladenosine-3'-phosphate
  modified_base 19: mod_base = OTHER; note = 2'-O-methyladenosine-3'-phosphorothioate
  modified_base 20: mod_base = OTHER; note = 2'-O-methyluridine-3'-phosphorothioate
  modified_base 21: mod_base = OTHER; note = 2'-O-methyladenosine
gtaccatgcagaatacaaata

SEQ ID NO: 746 - RNA, 21 nt, synthetic construct
  source 1..21: mol_type = other RNA
  modified_base 1: mod_base = OTHER; note = 2'-O-methyluridine-3'-phosphorothioate
  modified_base 2: mod_base = OTHER; note = 2'-O-methyladenosine-3'-phosphorothioate
  modified_base 3: mod_base = OTHER; note = 2'-O-methylcytidine-3'-phosphate
  modified_base 4: mod_base = OTHER; note = 2'-O-methylcytidine-3'-phosphate
  modified_base 5: mod_base = OTHER; note = 2'-O-methyladenosine-3'-phosphate
  modified_base 6: mod_base = OTHER; note = 2'-O-methyluridine-3'-phosphate
  modified_base 7: mod_base = OTHER; note = 2'-O-methylguanosine-3'-phosphate
  modified_base 8: mod_base = OTHER; note = 2'-O-methylcytidine-3'-phosphate
  modified_base 9: mod_base = OTHER; note = 2'-deoxy-2'-fluoroadenosine-3'-phosphate
  modified_base 10: mod_base = OTHER; note = 2'-deoxy-2'-fluoroguanosine-3'-phosphate
  modified_base 11: mod_base = OTHER; note = 2'-deoxy-2'-fluoroadenosine-3'-phosphate
  modified_base 12: mod_base = OTHER; note = 2'-O-methyladenosine-3'-phosphate
  modified_base 13: mod_base = OTHER; note = 2'-O-methyluridine-3'-phosphate
  modified_base 14: mod_base = OTHER; note = 2'-O-methyladenosine-3'-phosphate
  modified_base 15: mod_base = OTHER; note = 2'-O-methylcytidine-3'-phosphate
  modified_base 16: mod_base = OTHER; note = 2'-O-methyladenosine-3'-phosphate
  modified_base 17: mod_base = OTHER; note = 2'-O-methyladenosine-3'-phosphate
  modified_base 18: mod_base = OTHER; note = 2'-O-methyladenosine-3'-phosphate
  modified_base 19: mod_base = OTHER; note = 2'-O-methyluridine-3'-phosphorothioate
  modified_base 20: mod_base = OTHER; note = 2'-O-methylguanosine-3'-phosphorothioate
  modified_base 21: mod_base = OTHER; note = 2'-O-methyladenosine
taccatgcagaatacaaatga

SEQ ID NO: 747 - RNA, 21 nt, synthetic construct
  source 1..21: mol_type = other RNA
  modified_base 1: mod_base = OTHER; note = 2'-O-methyladenosine-3'-phosphorothioate
  modified_base 2: mod_base = OTHER; note = 2'-O-methylcytidine-3'-phosphorothioate
  modified_base 3: mod_base = OTHER; note = 2'-O-methylcytidine-3'-phosphate
  modified_base 4: mod_base = OTHER; note = 2'-O-methyladenosine-3'-phosphate
  modified_base 5: mod_base = OTHER; note = 2'-O-methyluridine-3'-phosphate
  modified_base 6: mod_base = OTHER; note = 2'-O-methylguanosine-3'-phosphate
  modified_base 7: mod_base = OTHER; note = 2'-O-methylcytidine-3'-phosphate
  modified_base 8: mod_base = OTHER; note = 2'-O-methyladenosine-3'-phosphate
  modified_base 9: mod_base = OTHER; note = 2'-deoxy-2'-fluoroguanosine-3'-phosphate
  modified_base 10: mod_base = OTHER; note = 2'-deoxy-2'-fluoroadenosine-3'-phosphate
  modified_base 11: mod_base = OTHER; note = 2'-deoxy-2'-fluoroadenosine-3'-phosphate
  modified_base 12: mod_base = OTHER; note = 2'-O-methyluridine-3'-phosphate
  modified_base 13: mod_base = OTHER; note = 2'-O-methyladenosine-3'-phosphate
  modified_base 14: mod_base = OTHER; note = 2'-O-methylcytidine-3'-phosphate
  modified_base 15: mod_base = OTHER; note = 2'-O-methyladenosine-3'-phosphate
  modified_base 16: mod_base = OTHER; note = 2'-O-methyladenosine-3'-phosphate
  modified_base 17: mod_base = OTHER; note = 2'-O-methyladenosine-3'-phosphate
  modified_base 18: mod_base = OTHER; note = 2'-O-methyluridine-3'-phosphate
  modified_base 19: mod_base = OTHER; note = 2'-O-methylguanosine-3'-phosphorothioate
  modified_base 20: mod_base = OTHER; note = 2'-O-methyladenosine-3'-phosphorothioate
  modified_base 21: mod_base = OTHER; note = 2'-O-methyladenosine
accatgcagaatacaaatgaa

SEQ ID NO: 748 - RNA, 21 nt, synthetic construct
  source 1..21: mol_type = other RNA
  modified_base 1: mod_base = OTHER; note = 2'-O-methylcytidine-3'-phosphorothioate
  modified_base 2: mod_base = OTHER; note = 2'-O-methylcytidine-3'-phosphorothioate
  modified_base 3: mod_base = OTHER; note = 2'-O-methyladenosine-3'-phosphate
  modified_base 4: mod_base = OTHER; note = 2'-O-methyluridine-3'-phosphate
  modified_base 5: mod_base = OTHER; note = 2'-O-methylguanosine-3'-phosphate
  modified_base 6: mod_base = OTHER; note = 2'-O-methylcytidine-3'-phosphate
  modified_base 7: mod_base = OTHER; note = 2'-O-methyladenosine-3'-phosphate
  modified_base 8: mod_base = OTHER; note = 2'-O-methylguanosine-3'-phosphate
  modified_base 9: mod_base = OTHER; note = 2'-deoxy-2'-fluoroadenosine-3'-phosphate
  modified_base 10: mod_base = OTHER; note = 2'-deoxy-2'-fluoroadenosine-3'-phosphate
  modified_base 11: mod_base = OTHER; note = 2'-deoxy-2'-fluorouridine-3'-phosphate
  modified_base 12: mod_base = OTHER; note = 2'-O-methyladenosine-3'-phosphate
  modified_base 13: mod_base = OTHER; note = 2'-O-methylcytidine-3'-phosphate
  modified_base 14: mod_base = OTHER; note = 2'-O-methyladenosine-3'-phosphate
  modified_base 15: mod_base = OTHER; note = 2'-O-methyladenosine-3'-phosphate
  modified_base 16: mod_base = OTHER; note = 2'-O-methyladenosine-3'-phosphate
  modified_base 17: mod_base = OTHER; note = 2'-O-methyluridine-3'-phosphate
  modified_base 18: mod_base = OTHER; note = 2'-O-methylguanosine-3'-phosphate
  modified_base 19: mod_base = OTHER; note = 2'-O-methyladenosine-3'-phosphorothioate
  modified_base 20: mod_base = OTHER; note = 2'-O-methyluridine-3'-phosphorothioate
  modified_base 21: mod_base = OTHER; note = 2'-O-methyladenosine
ccatgcagaatacaaatgata

SEQ ID NO: 749 - RNA, 21 nt, synthetic construct
  source 1..21: mol_type = other RNA
  modified_base 1: mod_base = OTHER; note = 2'-O-methylcytidine-3'-phosphorothioate
  modified_base 2: mod_base = OTHER; note = 2'-O-methyladenosine-3'-phosphorothioate
  modified_base 3: mod_base = OTHER; note = 2'-O-methyluridine-3'-phosphate
  modified_base 4: mod_base = OTHER; note = 2'-O-methylguanosine-3'-phosphate
  modified_base 5: mod_base = OTHER; note = 2'-O-methylcytidine-3'-phosphate
  modified_base 6: mod_base = OTHER; note = 2'-O-methyladenosine-3'-phosphate
  modified_base 7: mod_base = OTHER; note = 2'-O-methylguanosine-3'-phosphate
  modified_base 8: mod_base = OTHER; note = 2'-O-methyladenosine-3'-phosphate
  modified_base 9: mod_base = OTHER; note = 2'-deoxy-2'-fluoroadenosine-3'-phosphate
  modified_base 10: mod_base = OTHER; note = 2'-deoxy-2'-fluorouridine-3'-phosphate
  modified_base 11: mod_base = OTHER; note = 2'-deoxy-2'-fluoroadenosine-3'-phosphate
  modified_base 12: mod_base = OTHER; note = 2'-O-methylcytidine-3'-phosphate
  modified_base 13: mod_base = OTHER; note = 2'-O-methyladenosine-3'-phosphate
  modified_base 14: mod_base = OTHER; note = 2'-O-methyladenosine-3'-phosphate
  modified_base 15: mod_base = OTHER; note = 2'-O-methyladenosine-3'-phosphate
  modified_base 16: mod_base = OTHER; note = 2'-O-methyluridine-3'-phosphate
  modified_base 17: mod_base = OTHER; note = 2'-O-methylguanosine-3'-phosphate
  modified_base 18: mod_base = OTHER; note = 2'-O-methyladenosine-3'-phosphate
  modified_base 19: mod_base = OTHER; note = 2'-O-methyluridine-3'-phosphorothioate
  modified_base 20: mod_base = OTHER; note = 2'-O-methylguanosine-3'-phosphorothioate
  modified_base 21: mod_base = OTHER; note = 2'-O-methyladenosine
catgcagaatacaaatgatga

SEQ ID NO: 750 - RNA, 21 nt, synthetic construct
  source 1..21: mol_type = other RNA
  modified_base 1: mod_base = OTHER; note = 2'-O-methyladenosine-3'-phosphorothioate
  modified_base 2: mod_base = OTHER; note = 2'-O-methyluridine-3'-phosphorothioate
  modified_base 3: mod_base = OTHER; note = 2'-O-methylguanosine-3'-phosphate
  modified_base 4: mod_base = OTHER; note = 2'-O-methylcytidine-3'-phosphate
  modified_base 5: mod_base = OTHER; note = 2'-O-methyladenosine-3'-phosphate
  modified_base 6: mod_base = OTHER; note = 2'-O-methylguanosine-3'-phosphate
  modified_base 7: mod_base = OTHER; note = 2'-deoxy-2'-fluoroadenosine-3'-phosphate
  modified_base 8: mod_base = OTHER; note = 2'-O-methyladenosine-3'-phosphate
  modified_base 9: mod_base = OTHER; note = 2'-deoxy-2'-fluorouridine-3'-phosphate
  modified_base 10: mod_base = OTHER; note = 2'-deoxy-2'-fluoroadenosine-3'-phosphate
  modified_base 11: mod_base = OTHER; note = 2'-deoxy-2'-fluorocytidine-3'-phosphate
  modified_base 12: mod_base = OTHER; note = 2'-O-methyladenosine-3'-phosphate
  modified_base 13: mod_base = OTHER; note = 2'-O-methyladenosine-3'-phosphate
  modified_base 14: mod_base = OTHER; note = 2'-O-methyladenosine-3'-phosphate
  modified_base 15: mod_base = OTHER; note = 2'-O-methyluridine-3'-phosphate
  modified_base 16: mod_base = OTHER; note = 2'-O-methylguanosine-3'-phosphate
  modified_base 17: mod_base = OTHER; note = 2'-O-methyladenosine-3'-phosphate
  modified_base 18: mod_base = OTHER; note = 2'-O-methyluridine-3'-phosphate
  modified_base 19: mod_base = OTHER; note = 2'-O-methylguanosine-3'-phosphorothioate
  modified_base 20: mod_base = OTHER; note = 2'-O-methyluridine-3'-phosphorothioate
  modified_base 21: mod_base = OTHER; note = 2'-O-methyladenosine
atgcagaatacaaatgatgta

SEQ ID NO: 751 - RNA, 21 nt, synthetic construct
  source 1..21: mol_type = other RNA
  modified_base 1: mod_base = OTHER; note = 2'-O-methylguanosine-3'-phosphorothioate
  modified_base 2: mod_base = OTHER; note = 2'-O-methylcytidine-3'-phosphorothioate
  modified_base 3: mod_base = OTHER; note = 2'-O-methyladenosine-3'-phosphate
  modified_base 4: mod_base = OTHER; note = 2'-O-methylguanosine-3'-phosphate
  modified_base 5: mod_base = OTHER; note = 2'-O-methyladenosine-3'-phosphate
  modified_base 6: mod_base = OTHER; note = 2'-O-methyladenosine-3'-phosphate
  modified_base 7: mod_base = OTHER; note = 2'-O-methyluridine-3'-phosphate
  modified_base 8: mod_base = OTHER; note = 2'-O-methyladenosine-3'-phosphate
  modified_base 9: mod_base = OTHER; note = 2'-deoxy-2'-fluorocytidine-3'-phosphate
  modified_base 10: mod_base = OTHER; note = 2'-deoxy-2'-fluoroadenosine-3'-phosphate
  modified_base 11: mod_base = OTHER; note = 2'-deoxy-2'-fluoroadenosine-3'-phosphate
  modified_base 12: mod_base = OTHER; note = 2'-O-methyladenosine-3'-phosphate
  modified_base 13: mod_base = OTHER; note = 2'-O-methyluridine-3'-phosphate
  modified_base 14: mod_base = OTHER; note = 2'-O-methylguanosine-3'-phosphate
  modified_base 15: mod_base = OTHER; note = 2'-O-methyladenosine-3'-phosphate
  modified_base 16: mod_base = OTHER; note = 2'-O-methyluridine-3'-phosphate
  modified_base 17: mod_base = OTHER; note = 2'-O-methylguanosine-3'-phosphate
  modified_base 18: mod_base = OTHER; note = 2'-O-methyluridine-3'-phosphate
  modified_base 19: mod_base = OTHER; note = 2'-O-methyladenosine-3'-phosphorothioate
  modified_base 20: mod_base = OTHER; note = 2'-O-methylguanosine-3'-phosphorothioate
  modified_base 21: mod_base = OTHER; note = 2'-O-methyladenosine
gcagaatacaaatgatgtaga

SEQ ID NO: 752 - RNA, 21 nt, synthetic construct
  source 1..21: mol_type = other RNA
  modified_base 1: mod_base = OTHER; note = 2'-O-methylcytidine-3'-phosphorothioate
  modified_base 2: mod_base = OTHER; note = 2'-O-methyladenosine-3'-phosphorothioate
  modified_base 3: mod_base = OTHER; note = 2'-O-methylguanosine-3'-phosphate
  modified_base 4: mod_base = OTHER; note = 2'-O-methyladenosine-3'-phosphate
  modified_base 5: mod_base = OTHER; note = 2'-O-methyladenosine-3'-phosphate
  modified_base 6: mod_base = OTHER; note = 2'-O-methyluridine-3'-phosphate
  modified_base 7: mod_base = OTHER; note = 2'-deoxy-2'-fluoroadenosine-3'-phosphate
  modified_base 8: mod_base = OTHER; note = 2'-O-methylcytidine-3'-phosphate
  modified_base 9: mod_base = OTHER; note = 2'-deoxy-2'-fluoroadenosine-3'-phosphate
  modified_base 10: mod_base = OTHER; note = 2'-deoxy-2'-fluoroadenosine-3'-phosphate
  modified_base 11: mod_base = OTHER; note = 2'-deoxy-2'-fluoroadenosine-3'-phosphate
  modified_base 12: mod_base = OTHER; note = 2'-O-methyluridine-3'-phosphate
  modified_base 13: mod_base = OTHER; note = 2'-O-methylguanosine-3'-phosphate
  modified_base 14: mod_base = OTHER; note = 2'-O-methyladenosine-3'-phosphate
  modified_base 15: mod_base = OTHER; note = 2'-O-methyluridine-3'-phosphate
  modified_base 16: mod_base = OTHER; note = 2'-O-methylguanosine-3'-phosphate
  modified_base 17: mod_base = OTHER; note = 2'-O-methyluridine-3'-phosphate
  modified_base 18: mod_base = OTHER; note = 2'-O-methyladenosine-3'-phosphate
  modified_base 19: mod_base = OTHER; note = 2'-O-methylguanosine-3'-phosphorothioate
  modified_base 20: mod_base = OTHER; note = 2'-O-methyladenosine-3'-phosphorothioate
  modified_base 21: mod_base = OTHER; note = 2'-O-methyladenosine
cagaatacaaatgatgtagaa

SEQ ID NO: 753 - RNA, 21 nt, synthetic construct
  source 1..21: mol_type = other RNA
  modified_base 1: mod_base = OTHER; note = 2'-O-methyluridine-3'-phosphorothioate
  modified_base 2: mod_base = OTHER; note = 2'-O-methylguanosine-3'-phosphorothioate
  modified_base 3: mod_base = OTHER; note = 2'-O-methyladenosine-3'-phosphate
  modified_base 4: mod_base = OTHER; note = 2'-O-methyluridine-3'-phosphate
  modified_base 5: mod_base = OTHER; note = 2'-O-methylguanosine-3'-phosphate
  modified_base 6: mod_base = OTHER; note = 2'-O-methyluridine-3'-phosphate
  modified_base 7: mod_base = OTHER; note = 2'-O-methyladenosine-3'-phosphate
  modified_base 8: mod_base = OTHER; note = 2'-O-methylguanosine-3'-phosphate
  modified_base 9: mod_base = OTHER; note = 2'-deoxy-2'-fluoroadenosine-3'-phosphate
  modified_base 10: mod_base = OTHER; note = 2'-deoxy-2'-fluoroadenosine-3'-phosphate
  modified_base 11: mod_base = OTHER; note = 2'-deoxy-2'-fluoroadenosine-3'-phosphate
  modified_base 12: mod_base = OTHER; note = 2'-O-methylcytidine-3'-phosphate
  modified_base 13: mod_base = OTHER; note = 2'-O-methyladenosine-3'-phosphate
  modified_base 14: mod_base = OTHER; note = 2'-O-methylguanosine-3'-phosphate
  modified_base 15: mod_base = OTHER; note = 2'-O-methylcytidine-3'-phosphate
  modified_base 16: mod_base = OTHER; note = 2'-O-methyluridine-3'-phosphate
  modified_base 17: mod_base = OTHER; note = 2'-O-methylcytidine-3'-phosphate
  modified_base 18: mod_base = OTHER; note = 2'-O-methylguanosine-3'-phosphate
  modified_base 19: mod_base = OTHER; note = 2'-O-methyluridine-3'-phosphorothioate
  modified_base 20: mod_base = OTHER; note = 2'-O-methyluridine-3'-phosphorothioate
  modified_base 21: mod_base = OTHER; note = 2'-O-methyladenosine
tgatgtagaaacagctcgtta

SEQ ID NO: 754 - RNA, 21 nt, synthetic construct
  source 1..21: mol_type = other RNA
  modified_base 1: mod_base = OTHER; note = 2'-O-methylguanosine-3'-phosphorothioate
  modified_base 2: mod_base = OTHER; note = 2'-O-methyladenosine-3'-phosphorothioate
  modified_base 3: mod_base = OTHER; note = 2'-O-methyluridine-3'-phosphate
  modified_base 4: mod_base = OTHER; note = 2'-O-methylguanosine-3'-phosphate
  modified_base 5: mod_base = OTHER; note = 2'-O-methyluridine-3'-phosphate
  modified_base 6: mod_base = OTHER; note = 2'-O-methyladenosine-3'-phosphate
  modified_base 7: mod_base = OTHER; note = 2'-O-methylguanosine-3'-phosphate
  modified_base 8: mod_base = OTHER; note = 2'-O-methyladenosine-3'-phosphate
  modified_base 9: mod_base = OTHER; note = 2'-deoxy-2'-fluoroadenosine-3'-phosphate
  modified_base 10: mod_base = OTHER; note = 2'-deoxy-2'-fluoroadenosine-3'-phosphate
  modified_base 11: mod_base = OTHER; note = 2'-deoxy-2'-fluorocytidine-3'-phosphate
  modified_base 12: mod_base = OTHER; note = 2'-O-methyladenosine-3'-phosphate
  modified_base 13: mod_base = OTHER; note = 2'-O-methylguanosine-3'-phosphate
  modified_base 14: mod_base = OTHER; note = 2'-O-methylcytidine-3'-phosphate
  modified_base 15: mod_base = OTHER; note = 2'-O-methyluridine-3'-phosphate
  modified_base 16: mod_base = OTHER; note = 2'-O-methylcytidine-3'-phosphate
  modified_base 17: mod_base = OTHER; note = 2'-O-methylguanosine-3'-phosphate
  modified_base 18: mod_base = OTHER; note = 2'-O-methyluridine-3'-phosphate
  modified_base 19: mod_base = OTHER; note = 2'-O-methyluridine-3'-phosphorothioate
  modified_base 20: mod_base = OTHER; note = 2'-O-methylguanosine-3'-phosphorothioate
  modified_base 21: mod_base = OTHER; note = 2'-O-methyladenosine
gatgtagaaacagctcgttga

SEQ ID NO: 755 - RNA, 21 nt, synthetic construct
  source 1..21: mol_type = other RNA
  modified_base 1: mod_base = OTHER; note = 2'-O-methyladenosine-3'-phosphorothioate
  modified_base 2: mod_base = OTHER; note = 2'-O-methylcytidine-3'-phosphorothioate
  modified_base 3: mod_base = OTHER; note = 2'-O-methyluridine-3'-phosphate
  modified_base 4: mod_base = OTHER; note = 2'-O-methylguanosine-3'-phosphate
  modified_base 5: mod_base = OTHER; note = 2'-O-methylguanosine-3'-phosphate
  modified_base 6: mod_base = OTHER; note = 2'-O-methylcytidine-3'-phosphate
  modified_base 7: mod_base = OTHER; note = 2'-O-methylcytidine-3'-phosphate
  modified_base 8: mod_base = OTHER; note = 2'-O-methyladenosine-3'-phosphate
  modified_base 9: mod_base = OTHER; note = 2'-deoxy-2'-fluorouridine-3'-phosphate
  modified_base 10: mod_base = OTHER; note = 2'-deoxy-2'-fluorocytidine-3'-phosphate
  modified_base 11: mod_base = OTHER; note = 2'-deoxy-2'-fluorouridine-3'-phosphate
  modified_base 12: mod_base = OTHER; note = 2'-O-methyluridine-3'-phosphate
  modified_base 13: mod_base = OTHER; note = 2'-O-methyluridine-3'-phosphate
  modified_base 14: mod_base = OTHER; note = 2'-O-methyladenosine-3'-phosphate
  modified_base 15: mod_base = OTHER; note = 2'-O-methyladenosine-3'-phosphate
  modified_base 16: mod_base = OTHER; note = 2'-O-methylguanosine-3'-phosphate
  modified_base 17: mod_base = OTHER; note = 2'-O-methyluridine-3'-phosphate
  modified_base 18: mod_base = OTHER; note = 2'-O-methylcytidine-3'-phosphate
  modified_base 19: mod_base = OTHER; note = 2'-O-methyluridine-3'-phosphorothioate
  modified_base 20: mod_base = OTHER; note = 2'-O-methylguanosine-3'-phosphorothioate
  modified_base 21: mod_base = OTHER; note = 2'-O-methyladenosine
actggccatctttaagtctga

SEQ ID NO: 756 - RNA, 21 nt, synthetic construct
  source 1..21: mol_type = other RNA
  modified_base 1: mod_base = OTHER; note = 2'-O-methylcytidine-3'-phosphorothioate
  modified_base 2: mod_base = OTHER; note = 2'-O-methyluridine-3'-phosphorothioate
  modified_base 3: mod_base = OTHER; note = 2'-O-methylguanosine-3'-phosphate
  modified_base 4: mod_base = OTHER; note = 2'-O-methylguanosine-3'-phosphate
  modified_base 5: mod_base = OTHER; note = 2'-O-methylcytidine-3'-phosphate
  modified_base 6: mod_base = OTHER; note = 2'-O-methylcytidine-3'-phosphate
  modified_base 7: mod_base = OTHER; note = 2'-O-methyladenosine-3'-phosphate
  modified_base 8: mod_base = OTHER; note = 2'-O-methyluridine-3'-phosphate
  modified_base 9: mod_base = OTHER; note = 2'-deoxy-2'-fluorocytidine-3'-phosphate
  modified_base 10: mod_base = OTHER; note = 2'-deoxy-2'-fluorouridine-3'-phosphate
  modified_base 11: mod_base = OTHER; note = 2'-deoxy-2'-fluorouridine-3'-phosphate
  modified_base 12: mod_base = OTHER; note = 2'-O-methyluridine-3'-phosphate
  modified_base 13: mod_base = OTHER; note = 2'-O-methyladenosine-3'-phosphate
  modified_base 14: mod_base = OTHER; note = 2'-O-methyladenosine-3'-phosphate
  modified_base 15: mod_base = OTHER; note = 2'-O-methylguanosine-3'-phosphate
  modified_base 16: mod_base = OTHER; note = 2'-O-methyluridine-3'-phosphate
  modified_base 17: mod_base = OTHER; note = 2'-O-methylcytidine-3'-phosphate
  modified_base 18: mod_base = OTHER; note = 2'-O-methyluridine-3'-phosphate
  modified_base 19: mod_base = OTHER; note = 2'-O-methylguanosine-3'-phosphorothioate
  modified_base 20: mod_base = OTHER; note = 2'-O-methylguanosine-3'-phosphorothioate
  modified_base 21: mod_base = OTHER; note = 2'-O-methyladenosine
ctggccatctttaagtctgga

SEQ ID NO: 757 - RNA, 21 nt, synthetic construct
  source 1..21: mol_type = other RNA
  modified_base 1: mod_base = OTHER; note = 2'-O-methyluridine-3'-phosphorothioate
  modified_base 2: mod_base = OTHER; note = 2'-O-methylguanosine-3'-phosphorothioate
  modified_base 3: mod_base = OTHER; note = 2'-O-methylguanosine-3'-phosphate
  modified_base 4: mod_base = OTHER; note = 2'-O-methylcytidine-3'-phosphate
  modified_base 5: mod_base = OTHER; note = 2'-O-methylcytidine-3'-phosphate
  modified_base 6: mod_base = OTHER; note = 2'-O-methyladenosine-3'-phosphate
  modified_base 7: mod_base = OTHER; note = 2'-deoxy-2'-fluorouridine-3'-phosphate
  modified_base 8: mod_base = OTHER; note = 2'-O-methylcytidine-3'-phosphate
  modified_base 9: mod_base = OTHER; note = 2'-deoxy-2'-fluorouridine-3'-phosphate
  modified_base 10: mod_base = OTHER; note = 2'-deoxy-2'-fluorouridine-3'-phosphate
  modified_base 11: mod_base = OTHER; note = 2'-deoxy-2'-fluorouridine-3'-phosphate
  modified_base 12: mod_base = OTHER; note = 2'-O-methyladenosine-3'-phosphate
  modified_base 13: mod_base = OTHER; note = 2'-O-methyladenosine-3'-phosphate
  modified_base 14: mod_base = OTHER; note = 2'-O-methylguanosine-3'-phosphate
  modified_base 15: mod_base = OTHER; note = 2'-O-methyluridine-3'-phosphate
  modified_base 16: mod_base = OTHER; note = 2'-O-methylcytidine-3'-phosphate
  modified_base 17: mod_base = OTHER; note = 2'-O-methyluridine-3'-phosphate
  modified_base 18: mod_base = OTHER; note = 2'-O-methylguanosine-3'-phosphate
  modified_base 19: mod_base = OTHER; note = 2'-O-methylguanosine-3'-phosphorothioate
  modified_base 20: mod_base = OTHER; note = 2'-O-methyladenosine-3'-phosphorothioate
  modified_base 21: mod_base = OTHER; note = 2'-O-methyladenosine
tggccatctttaagtctggaa

SEQ ID NO: 758 - RNA, 21 nt, synthetic construct
  source 1..21: mol_type = other RNA
  modified_base 1: mod_base = OTHER; note = 2'-O-methylguanosine-3'-phosphorothioate
  modified_base 2: mod_base = OTHER; note = 2'-O-methylguanosine-3'-phosphorothioate
  modified_base 3: mod_base = OTHER; note = 2'-O-methylcytidine-3'-phosphate
  modified_base 4: mod_base = OTHER; note = 2'-O-methylcytidine-3'-phosphate
  modified_base 5: mod_base = OTHER; note = 2'-O-methyladenosine-3'-phosphate
  modified_base 6: mod_base = OTHER; note = 2'-O-methyluridine-3'-phosphate
  modified_base 7: mod_base = OTHER; note = 2'-O-methylcytidine-3'-phosphate
  modified_base 8: mod_base = OTHER; note = 2'-O-methyluridine-3'-phosphate
  modified_base 9: mod_base = OTHER; note = 2'-deoxy-2'-fluorouridine-3'-phosphate
  modified_base 10: mod_base = OTHER; note = 2'-deoxy-2'-fluorouridine-3'-phosphate
  modified_base 11: mod_base = OTHER; note = 2'-deoxy-2'-fluoroadenosine-3'-phosphate
  modified_base 12: mod_base = OTHER; note = 2'-O-methyladenosine-3'-phosphate
  modified_base 13: mod_base = OTHER; note = 2'-O-methylguanosine-3'-phosphate
  modified_base 14: mod_base = OTHER; note = 2'-O-methyluridine-3'-phosphate
  modified_base 15: mod_base = OTHER; note = 2'-O-methylcytidine-3'-phosphate
  modified_base 16: mod_base = OTHER; note = 2'-O-methyluridine-3'-phosphate
  modified_base 17: mod_base = OTHER; note = 2'-O-methylguanosine-3'-phosphate
  modified_base 18: mod_base = OTHER; note = 2'-O-methylguanosine-3'-phosphate
  modified_base 19: mod_base = OTHER; note = 2'-O-methyladenosine-3'-phosphorothioate
  modified_base 20: mod_base = OTHER; note = 2'-O-methylguanosine-3'-phosphorothioate
  modified_base 21: mod_base = OTHER; note = 2'-O-methyladenosine
ggccatctttaagtctggaga

SEQ ID NO: 759 - RNA, 21 nt, synthetic construct
  source 1..21: mol_type = other RNA
  modified_base 1: mod_base = OTHER; note = 2'-O-methylguanosine-3'-phosphorothioate
  modified_base 2: mod_base = OTHER; note = 2'-O-methylcytidine-3'-phosphorothioate
  modified_base 3: mod_base = OTHER; note = 2'-O-methylcytidine-3'-phosphate
  modified_base 4: mod_base = OTHER; note = 2'-O-methyladenosine-3'-phosphate
  modified_base 5: mod_base = OTHER; note = 2'-O-methyluridine-3'-phosphate
  modified_base 6: mod_base = OTHER; note = 2'-O-methylcytidine-3'-phosphate
  modified_base 7: mod_base = OTHER; note = 2'-O-methyluridine-3'-phosphate
  modified_base 8: mod_base = OTHER; note = 2'-O-methyluridine-3'-phosphate
  modified_base 9: mod_base = OTHER; note = 2'-deoxy-2'-fluorouridine-3'-phosphate
  modified_base 10: mod_base = OTHER; note = 2'-deoxy-2'-fluoroadenosine-3'-phosphate
  modified_base 11: mod_base = OTHER; note = 2'-deoxy-2'-fluoroadenosine-3'-phosphate
  modified_base 12: mod_base = OTHER; note = 2'-O-methylguanosine-3'-phosphate
  modified_base 13: mod_base = OTHER; note = 2'-O-methyluridine-3'-phosphate
  modified_base 14: mod_base = OTHER; note = 2'-O-methylcytidine-3'-phosphate
  modified_base 15: mod_base = OTHER; note = 2'-O-methyluridine-3'-phosphate
  modified_base 16: mod_base = OTHER; note = 2'-O-methylguanosine-3'-phosphate
  modified_base 17: mod_base = OTHER; note = 2'-O-methylguanosine-3'-phosphate
  modified_base 18: mod_base = OTHER; note = 2'-O-methyladenosine-3'-phosphate
  modified_base 19: mod_base = OTHER; note = 2'-O-methylguanosine-3'-phosphorothioate
  modified_base 20: mod_base = OTHER; note = 2'-O-methylguanosine-3'-phosphorothioate
  modified_base 21: mod_base = OTHER; note = 2'-O-methyladenosine
gccatctttaagtctggagga

SEQ ID NO: 760 - RNA, 21 nt, synthetic construct
  source 1..21: mol_type = other RNA
  modified_base 1: mod_base = OTHER; note = 2'-O-methyluridine-3'-phosphorothioate
  modified_base 2: mod_base = OTHER; note = 2'-O-methylguanosine-3'-phosphorothioate
  modified_base 3: mod_base = OTHER; note = 2'-O-methylguanosine-3'-phosphate
  modified_base 4: mod_base = OTHER; note = 2'-O-methyluridine-3'-phosphate
  modified_base 5: mod_base = OTHER; note = 2'-O-methyluridine-3'-phosphate
  modified_base 6: mod_base = OTHER; note = 2'-O-methylcytidine-3'-phosphate
  modified_base 7: mod_base = OTHER; note = 2'-O-methyladenosine-3'-phosphate
  modified_base 8: mod_base = OTHER; note = 2'-O-methylcytidine-3'-phosphate
  modified_base 9: mod_base = OTHER; note = 2'-deoxy-2'-fluorocytidine-3'-phosphate
  modified_base 10: mod_base = OTHER; note = 2'-deoxy-2'-fluoroadenosine-3'-phosphate
  modified_base 11: mod_base = OTHER; note = 2'-deoxy-2'-fluoroguanosine-3'-phosphate
  modified_base 12: mod_base = OTHER; note = 2'-O-methyluridine-3'-phosphate
  modified_base 13: mod_base = OTHER; note = 2'-O-methylguanosine-3'-phosphate
  modified_base 14: mod_base = OTHER; note = 2'-O-methylguanosine-3'-phosphate
  modified_base 15: mod_base = OTHER; note = 2'-O-methyladenosine-3'-phosphate
  modified_base 16: mod_base = OTHER; note = 2'-O-methyluridine-3'-phosphate
  modified_base 17: mod_base = OTHER; note = 2'-O-methyluridine-3'-phosphate
  modified_base 18: mod_base = OTHER; note = 2'-O-methylcytidine-3'-phosphate
  modified_base 19: mod_base = OTHER; note = 2'-O-methyluridine-3'-phosphorothioate
  modified_base 20: mod_base = OTHER; note = 2'-O-methylguanosine-3'-phosphorothioate
  modified_base 21: mod_base = OTHER; note = 2'-O-methyladenosine
tggttcaccagtggattctga

SEQ ID NO: 761 - RNA, 21 nt, synthetic construct
  source 1..21: mol_type = other RNA
  modified_base 1: mod_base = OTHER; note = 2'-O-methyladenosine-3'-phosphorothioate
  modified_base 2: mod_base = OTHER; note = 2'-O-methylcytidine-3'-phosphorothioate
  modified_base 3: mod_base = OTHER; note = 2'-O-methylcytidine-3'-phosphate
  modified_base 4: mod_base = OTHER; note = 2'-O-methyladenosine-3'-phosphate
  modified_base 5: mod_base = OTHER; note = 2'-O-methylguanosine-3'-phosphate
  modified_base 6: mod_base = OTHER; note = 2'-O-methyluridine-3'-phosphate
  modified_base 7: mod_base = OTHER; note = 2'-O-methylguanosine-3'-phosphate
  modified_base 8: mod_base = OTHER; note = 2'-O-methylguanosine-3'-phosphate
  modified_base 9: mod_base = OTHER; note = 2'-deoxy-2'-fluoroadenosine-3'-phosphate
  modified_base 10: mod_base = OTHER; note = 2'-deoxy-2'-fluorouridine-3'-phosphate
  modified_base 11: mod_base = OTHER; note = 2'-deoxy-2'-fluorouridine-3'-phosphate
  modified_base 12: mod_base = OTHER; note = 2'-O-methylcytidine-3'-phosphate
  modified_base 13: mod_base = OTHER; note = 2'-O-methyluridine-3'-phosphate
  modified_base 14: mod_base = OTHER; note = 2'-O-methylguanosine-3'-phosphate
  modified_base 15: mod_base = OTHER; note = 2'-O-methyluridine-3'-phosphate
  modified_base 16: mod_base = OTHER; note = 2'-O-methylguanosine-3'-phosphate
  modified_base 17: mod_base = OTHER; note = 2'-O-methyluridine-3'-phosphate
  modified_base 18: mod_base = OTHER; note = 2'-O-methyluridine-3'-phosphate
  modified_base 19: mod_base = OTHER; note = 2'-O-methylguanosine-3'-phosphorothioate
  modified_base 20: mod_base = OTHER; note = 2'-O-methyluridine-3'-phosphorothioate
  modified_base 21: mod_base = OTHER; note = 2'-O-methyladenosine
accagtggattctgtgttgta

SEQ ID NO: 762 - RNA, 21 nt, synthetic construct
  source 1..21: mol_type = other RNA
  modified_base 1: mod_base = OTHER; note = 2'-O-methyladenosine-3'-phosphorothioate
  modified_base 2: mod_base = OTHER; note = 2'-O-methyluridine-3'-phosphorothioate
  modified_base 3: mod_base = OTHER; note = 2'-O-methylguanosine-3'-phosphate
  modified_base 4: mod_base = OTHER; note = 2'-O-methylguanosine-3'-phosphate
  modified_base 5: mod_base = OTHER; note = 2'-O-methylcytidine-3'-phosphate
  modified_base 6: mod_base = OTHER; note = 2'-O-methyladenosine-3'-phosphate
  modified_base 7: mod_base = OTHER; note = 2'-deoxy-2'-fluoroguanosine-3'-phosphate
  modified_base 8: mod_base = OTHER; note = 2'-O-methyluridine-3'-phosphate
  modified_base 9: mod_base = OTHER; note = 2'-deoxy-2'-fluoroguanosine-3'-phosphate
  modified_base 10: mod_base = OTHER; note = 2'-deoxy-2'-fluorocytidine-3'-phosphate
  modified_base 11: mod_base = OTHER; note = 2'-deoxy-2'-fluoroguanosine-3'-phosphate
  modified_base 12: mod_base = OTHER; note = 2'-O-methyluridine-3'-phosphate
  modified_base 13: mod_base = OTHER; note = 2'-O-methyluridine-3'-phosphate
  modified_base 14: mod_base = OTHER; note = 2'-O-methyluridine-3'-phosphate
  modified_base 15: mod_base = OTHER; note = 2'-O-methyladenosine-3'-phosphate
  modified_base 16: mod_base = OTHER; note = 2'-O-methylguanosine-3'-phosphate
  modified_base 17: mod_base = OTHER; note = 2'-O-methylcytidine-3'-phosphate
  modified_base 18: mod_base = OTHER; note = 2'-O-methyluridine-3'-phosphate
  modified_base 19: mod_base = OTHER; note = 2'-O-methylguanosine-3'-phosphorothioate
  modified_base 20: mod_base = OTHER; note = 2'-O-methylguanosine-3'-phosphorothioate
  modified_base 21: mod_base = OTHER; note = 2'-O-methyladenosine
atggcagtgcgtttagctgga

SEQ ID NO: 763 - RNA, 21 nt, synthetic construct
  source 1..21: mol_type = other RNA
  modified_base 1: mod_base = OTHER; note = 2'-O-methyladenosine-3'-phosphorothioate
  modified_base 2: mod_base = OTHER; note = 2'-O-methyluridine-3'-phosphorothioate
  modified_base 3: mod_base = OTHER; note = 2'-O-methylguanosine-3'-phosphate
  modified_base 4: mod_base = OTHER; note = 2'-O-methylguanosine-3'-phosphate
  modified_base 5: mod_base = OTHER; note = 2'-O-methylcytidine-3'-phosphate
  modified_base 6: mod_base = OTHER; note = 2'-O-methyladenosine-3'-phosphate
  modified_base 7: mod_base = OTHER; note = 2'-O-methylguanosine-3'-phosphate
  modified_base 8: mod_base = OTHER; note = 2'-O-methyluridine-3'-phosphate
  modified_base 9: mod_base = OTHER; note = 2'-deoxy-2'-fluoroguanosine-3'-phosphate
  modified_base 10: mod_base = OTHER; note = 2'-deoxy-2'-fluorocytidine-3'-phosphate
  modified_base 11: mod_base = OTHER; note = 2'-deoxy-2'-fluoroguanosine-3'-phosphate
  modified_base 12: mod_base = OTHER; note = 2'-O-methyluridine-3'-phosphate
  modified_base 13: mod_base = OTHER; note = 2'-O-methyluridine-3'-phosphate
  modified_base 14: mod_base = OTHER; note = 2'-O-methyluridine-3'-phosphate
  modified_base 15: mod_base = OTHER; note = 2'-O-methyladenosine-3'-phosphate
  modified_base 16: mod_base = OTHER; note = 2'-O-methylguanosine-3'-phosphate
  modified_base 17: mod_base = OTHER; note = 2'-O-methylcytidine-3'-phosphate
  modified_base 18: mod_base = OTHER; note = 2'-O-methyluridine-3'-phosphate
  modified_base 19: mod_base = OTHER; note = 2'-O-methylguanosine-3'-phosphorothioate
  modified_base 20: mod_base = OTHER; note = 2'-O-methylguanosine-3'-phosphorothioate
  modified_base 21: mod_base = OTHER; note = 2'-O-methyladenosine
atggcagtgcgtttagctgga

SEQ ID NO: 764 - RNA, 21 nt, synthetic construct
  source 1..21: mol_type = other RNA
  modified_base 1: mod_base = OTHER; note = 2'-O-methyluridine-3'-phosphorothioate
  modified_base 2: mod_base = OTHER; note = 2'-O-methyluridine-3'-phosphorothioate
  modified_base 3: mod_base = OTHER; note = 2'-O-methylguanosine-3'-phosphate
  modified_base 4: mod_base = OTHER; note = 2'-O-methylcytidine-3'-phosphate
  modified_base 5: mod_base = OTHER; note = 2'-O-methylcytidine-3'-phosphate
  modified_base 6: mod_base = OTHER; note = 2'-O-methyluridine-3'-phosphate
  modified_base 7: mod_base = OTHER; note = 2'-deoxy-2'-fluorouridine-3'-phosphate
  modified_base 8: mod_base = OTHER; note = 2'-O-methylguanosine-3'-phosphate
  modified_base 9: mod_base = OTHER; note = 2'-deoxy-2'-fluorocytidine-3'-phosphate
  modified_base 10: mod_base = OTHER; note = 2'-deoxy-2'-fluorouridine-3'-phosphate
  modified_base 11: mod_base = OTHER; note = 2'-deoxy-2'-fluorocytidine-3'-phosphate
  modified_base 12: mod_base = OTHER; note = 2'-O-methyladenosine-3'-phosphate
  modified_base 13: mod_base = OTHER; note = 2'-O-methyladenosine-3'-phosphate
  modified_base 14: mod_base = OTHER; note = 2'-O-methylcytidine-3'-phosphate
  modified_base 15: mod_base = OTHER; note = 2'-O-methyladenosine-3'-phosphate
  modified_base 16: mod_base = OTHER; note = 2'-O-methyladenosine-3'-phosphate
  modified_base 17: mod_base = OTHER; note = 2'-O-methyladenosine-3'-phosphate
  modified_base 18: mod_base = OTHER; note = 2'-O-methyladenosine-3'-phosphate
  modified_base 19: mod_base = OTHER; note = 2'-O-methylcytidine-3'-phosphorothioate
  modified_base 20: mod_base = OTHER; note = 2'-O-methyladenosine-3'-phosphorothioate
  modified_base 21: mod_base = OTHER; note = 2'-O-methyladenosine
ttgccttgctcaacaaaacaa

SEQ ID NO: 765 - RNA, 21 nt, synthetic construct
  source 1..21: mol_type = other RNA
  modified_base 1: mod_base = OTHER; note = 2'-O-methyluridine-3'-phosphorothioate
  modified_base 2: mod_base = OTHER; note = 2'-O-methylguanosine-3'-phosphorothioate
  modified_base 3: mod_base = OTHER; note = 2'-O-methylcytidine-3'-phosphate
  modified_base 4: mod_base = OTHER; note = 2'-O-methylcytidine-3'-phosphate
  modified_base 5: mod_base = OTHER; note = 2'-O-methyluridine-3'-phosphate
  modified_base 6: mod_base = OTHER; note = 2'-O-methyluridine-3'-phosphate
  modified_base 7: mod_base = OTHER; note = 2'-O-methylguanosine-3'-phosphate
  modified_base 8: mod_base = OTHER; note = 2'-O-methylcytidine-3'-phosphate
  modified_base 9: mod_base = OTHER; note = 2'-deoxy-2'-fluorouridine-3'-phosphate
  modified_base 10: mod_base = OTHER; note = 2'-deoxy-2'-fluorocytidine-3'-phosphate
  modified_base 11: mod_base = OTHER; note = 2'-deoxy-2'-fluoroadenosine-3'-phosphate
  modified_base 12: mod_base = OTHER; note = 2'-O-methyladenosine-3'-phosphate
  modified_base 13: mod_base = OTHER; note = 2'-O-methylcytidine-3'-phosphate
  modified_base 14: mod_base = OTHER; note = 2'-O-methyladenosine-3'-phosphate
  modified_base 15: mod_base = OTHER; note = 2'-O-methyladenosine-3'-phosphate
  modified_base 16: mod_base = OTHER; note = 2'-O-methyladenosine-3'-phosphate
  modified_base 17: mod_base = OTHER; note = 2'-O-methyladenosine-3'-phosphate
  modified_base 18: mod_base = OTHER; note = 2'-O-methylcytidine-3'-phosphate
  modified_base 19: mod_base = OTHER; note = 2'-O-methyladenosine-3'-phosphorothioate
  modified_base 20: mod_base = OTHER; note = 2'-O-methyladenosine-3'-phosphorothioate
  modified_base 21: mod_base = OTHER; note = 2'-O-methyladenosine
tgccttgctcaacaaaacaaa

SEQ ID NO: 766 - RNA, 21 nt, synthetic construct
  source 1..21: mol_type = other RNA
  modified_base 1: mod_base = OTHER; note = 2'-O-methyluridine-3'-phosphorothioate
  modified_base 2: mod_base = OTHER; note = 2'-O-methylguanosine-3'-phosphorothioate
  modified_base 3: mod_base = OTHER; note = 2'-O-methylcytidine-3'-phosphate
  modified_base 4: mod_base = OTHER; note = 2'-O-methylcytidine-3'-phosphate
  modified_base 5: mod_base = OTHER; note = 2'-O-methyluridine-3'-phosphate
  modified_base 6: mod_base = OTHER; note = 2'-O-methyluridine-3'-phosphate
  modified_base 7: mod_base = OTHER; note = 2'-deoxy-2'-fluoroguanosine-3'-phosphate
  modified_base 8: mod_base = OTHER; note = 2'-O-methylcytidine-3'-phosphate
  modified_base 9: mod_base = OTHER; note = 2'-deoxy-2'-fluorouridine-3'-phosphate
  modified_base 10: mod_base = OTHER; note = 2'-deoxy-2'-fluorocytidine-3'-phosphate
  modified_base 11: mod_base = OTHER; note = 2'-deoxy-2'-fluoroadenosine-3'-phosphate
  modified_base 12: mod_base = OTHER; note = 2'-O-methyladenosine-3'-phosphate
  modified_base 13: mod_base = OTHER; note = 2'-O-methylcytidine-3'-phosphate
  modified_base 14: mod_base = OTHER; note = 2'-O-methyladenosine-3'-phosphate
  modified_base 15: mod_base = OTHER; note = 2'-O-methyladenosine-3'-phosphate
  modified_base 16: mod_base = OTHER; note = 2'-O-methyladenosine-3'-phosphate
  modified_base 17: mod_base = OTHER; note = 2'-O-methyladenosine-3'-phosphate
  modified_base 18: mod_base = OTHER; note = 2'-O-methylcytidine-3'-phosphate
  modified_base 19: mod_base = OTHER; note = 2'-O-methyladenosine-3'-phosphorothioate
  modified_base 20: mod_base = OTHER; note = 2'-O-methyladenosine-3'-phosphorothioate
  modified_base 21: mod_base = OTHER; note = 2'-O-methyladenosine
tgccttgctcaacaaaacaaa

SEQ ID NO: 767 - RNA, 21 nt, synthetic construct
  source 1..21: mol_type = other RNA
  modified_base 1: mod_base = OTHER; note = 2'-O-methylguanosine-3'-phosphorothioate
  modified_base 2: mod_base = OTHER; note = 2'-O-methylcytidine-3'-phosphorothioate
  modified_base 3: mod_base = OTHER; note = 2'-O-methylcytidine-3'-phosphate
  modified_base 4: mod_base = OTHER; note = 2'-O-methyluridine-3'-phosphate
  modified_base 5: mod_base = OTHER; note = 2'-O-methyluridine-3'-phosphate
  modified_base 6: mod_base = OTHER; note = 2'-O-methylguanosine-3'-phosphate
  modified_base 7: mod_base = OTHER; note = 2'-deoxy-2'-fluorocytidine-3'-phosphate
  modified_base 8: mod_base = OTHER; note = 2'-O-methyluridine-3'-phosphate
  modified_base 9: mod_base = OTHER; note = 2'-deoxy-2'-fluorocytidine-3'-phosphate
  modified_base 10: mod_base = OTHER; note = 2'-deoxy-2'-fluoroadenosine-3'-phosphate
  modified_base 11: mod_base = OTHER; note = 2'-deoxy-2'-fluoroadenosine-3'-phosphate
  modified_base 12: mod_base = OTHER; note = 2'-O-methylcytidine-3'-phosphate
  modified_base 13: mod_base = OTHER; note = 2'-O-methyladenosine-3'-phosphate
  modified_base 14: mod_base = OTHER; note = 2'-O-methyladenosine-3'-phosphate
  modified_base 15: mod_base = OTHER; note = 2'-O-methyladenosine-3'-phosphate
  modified_base 16: mod_base = OTHER; note = 2'-O-methyladenosine-3'-phosphate
  modified_base 17: mod_base = OTHER; note = 2'-O-methylcytidine-3'-phosphate
  modified_base 18: mod_base = OTHER; note = 2'-O-methyladenosine-3'-phosphate
  modified_base 19: mod_base = OTHER; note = 2'-O-methyladenosine-3'-phosphorothioate
  modified_base 20: mod_base = OTHER; note = 2'-O-methyladenosine-3'-phosphorothioate
  modified_base 21: mod_base = OTHER; note = 2'-O-methyladenosine
gccttgctcaacaaaacaaaa

SEQ ID NO: 768 - RNA, 21 nt, synthetic construct
  source 1..21: mol_type = other RNA
  modified_base 1: mod_base = OTHER; note = 2'-O-methyluridine-3'-phosphorothioate
  modified_base 2: mod_base = OTHER; note = 2'-O-methyluridine-3'-phosphorothioate
  modified_base 3: mod_base = OTHER; note = 2'-O-methyladenosine-3'-phosphate
  modified_base 4: mod_base = OTHER; note = 2'-O-methyladenosine-3'-phosphate
  modified_base 5: mod_base = OTHER; note = 2'-O-methyladenosine-3'-phosphate
  modified_base 6: mod_base = OTHER; note = 2'-O-methyluridine-3'-phosphate
  modified_base 7: mod_base = OTHER; note = 2'-O-methyluridine-3'-phosphate
  modified_base 8: mod_base = OTHER; note = 2'-O-methylcytidine-3'-phosphate
  modified_base 9: mod_base = OTHER; note = 2'-deoxy-2'-fluorouridine-3'-phosphate
  modified_base 10: mod_base = OTHER; note = 2'-deoxy-2'-fluorouridine-3'-phosphate
  modified_base 11: mod_base = OTHER; note = 2'-deoxy-2'-fluoroguanosine-3'-phosphate
  modified_base 12: mod_base = OTHER; note = 2'-O-methylguanosine-3'-phosphate
  modified_base 13: mod_base = OTHER; note = 2'-O-methylcytidine-3'-phosphate
  modified_base 14: mod_base = OTHER; note = 2'-O-methyluridine-3'-phosphate
  modified_base 15: mod_base = OTHER; note = 2'-O-methyladenosine-3'-phosphate
  modified_base 16: mod_base = OTHER; note = 2'-O-methyluridine-3'-phosphate
  modified_base 17: mod_base = OTHER; note = 2'-O-methyluridine-3'-phosphate
  modified_base 18: mod_base = OTHER; note = 2'-O-methyladenosine-3'-phosphate
  modified_base 19: mod_base = OTHER; note = 2'-O-methylcytidine-3'-phosphorothioate
  modified_base 20: mod_base = OTHER; note = 2'-O-methylguanosine-3'-phosphorothioate
  modified_base 21: mod_base = OTHER; note = 2'-O-methyladenosine
ttaaattcttggctattacga

SEQ ID NO: 769 - RNA, 21 nt, synthetic construct
  source 1..21: mol_type = other RNA
  modified_base 1: mod_base = OTHER; note = 2'-O-methyladenosine-3'-phosphorothioate
  modified_base 2: mod_base = OTHER; note = 2'-O-methyluridine-3'-phosphorothioate
  modified_base 3: mod_base = OTHER; note = 2'-O-methyluridine-3'-phosphate
  modified_base 4: mod_base = OTHER; note = 2'-O-methylcytidine-3'-phosphate
  modified_base 5: mod_base = OTHER; note = 2'-O-methyluridine-3'-phosphate
  modified_base 6: mod_base = OTHER; note = 2'-O-methyluridine-3'-phosphate
  modified_base 7: mod_base = OTHER; note = 2'-O-methylguanosine-3'-phosphate
  modified_base 8: mod_base = OTHER; note = 2'-O-methylguanosine-3'-phosphate
  modified_base 9: mod_base = OTHER; note = 2'-deoxy-2'-fluorocytidine-3'-phosphate
  modified_base 10: mod_base = OTHER; note = 2'-deoxy-2'-fluorouridine-3'-phosphate
  modified_base 11: mod_base = OTHER; note = 2'-deoxy-2'-fluoroadenosine-3'-phosphate
  modified_base 12: mod_base = OTHER; note = 2'-O-methyluridine-3'-phosphate
  modified_base 13: mod_base = OTHER; note = 2'-O-methyluridine-3'-phosphate
  modified_base 14: mod_base = OTHER; note = 2'-O-methyladenosine-3'-phosphate
  modified_base 15: mod_base = OTHER; note = 2'-O-methylcytidine-3'-phosphate
  modified_base 16: mod_base = OTHER; note = 2'-O-methylguanosine-3'-phosphate
  modified_base 17: mod_base = OTHER; note = 2'-O-methyladenosine-3'-phosphate
  modified_base 18: mod_base = OTHER; note = 2'-O-methylcytidine-3'-phosphate
  modified_base 19: mod_base = OTHER; note = 2'-O-methyladenosine-3'-phosphorothioate
  modified_base 20: mod_base = OTHER; note = 2'-O-methylguanosine-3'-phosphorothioate
  modified_base 21: mod_base = OTHER; note = 2'-O-methyladenosine
attcttggctattacgacaga

SEQ ID NO: 770 - RNA, 21 nt, synthetic construct
  source 1..21: mol_type = other RNA
  modified_base 1: mod_base = OTHER; note = 2'-O-methylguanosine-3'-phosphorothioate
  modified_base 2: mod_base = OTHER; note = 2'-O-methylguanosine-3'-phosphorothioate
  modified_base 3: mod_base = OTHER; note = 2'-O-methylcytidine-3'-phosphate
  modified_base 4: mod_base = OTHER; note = 2'-O-methyluridine-3'-phosphate
  modified_base 5: mod_base = OTHER; note = 2'-O-methyladenosine-3'-phosphate
  modified_base 6: mod_base = OTHER; note = 2'-O-methyluridine-3'-phosphate
  modified_base 7: mod_base = OTHER; note = 2'-deoxy-2'-fluorouridine-3'-phosphate
  modified_base 8: mod_base = OTHER; note = 2'-O-methyladenosine-3'-phosphate
  modified_base 9: mod_base = OTHER; note = 2'-deoxy-2'-fluorocytidine-3'-phosphate
  modified_base 10: mod_base = OTHER; note = 2'-deoxy-2'-fluoroguanosine-3'-phosphate
  modified_base 11: mod_base = OTHER; note = 2'-deoxy-2'-fluoroadenosine-3'-phosphate
  modified_base 12: mod_base = OTHER; note = 2'-O-methylcytidine-3'-phosphate
  modified_base 13: mod_base = OTHER; note = 2'-O-methyladenosine-3'-phosphate
  modified_base 14: mod_base = OTHER; note = 2'-O-methylguanosine-3'-phosphate
  modified_base 15: mod_base = OTHER; note = 2'-O-methyladenosine-3'-phosphate
  modified_base 16: mod_base = OTHER; note = 2'-O-methylcytidine-3'-phosphate
  modified_base 17: mod_base = OTHER; note = 2'-O-methyluridine-3'-phosphate
  modified_base 18: mod_base = OTHER; note = 2'-O-methylguanosine-3'-phosphate
  modified_base 19: mod_base = OTHER; note = 2'-O-methylcytidine-3'-phosphorothioate
  modified_base 20: mod_base = OTHER; note = 2'-O-methylcytidine-3'-phosphorothioate
  modified_base 21: mod_base = OTHER; note = 2'-O-methyladenosine
ggctattacgacagactgcca

SEQ ID NO: 771 - RNA, 21 nt, synthetic construct
  source 1..21: mol_type = other RNA
  modified_base 1: mod_base = OTHER; note = 2'-O-methyluridine-3'-phosphorothioate
  modified_base 2: mod_base = OTHER; note = 2'-O-methyladenosine-3'-phosphorothioate
  modified_base 3: mod_base = OTHER; note = 2'-O-methylcytidine-3'-phosphate
  modified_base 4: mod_base = OTHER; note = 2'-O-methylguanosine-3'-phosphate
  modified_base 5: mod_base = OTHER; note = 2'-O-methyladenosine-3'-phosphate
  modified_base 6: mod_base = OTHER; note = 2'-O-methylcytidine-3'-phosphate
  modified_base 7: mod_base = OTHER; note = 2'-deoxy-2'-fluoroadenosine-3'-phosphate
  modified_base 8: mod_base = OTHER; note = 2'-O-methylguanosine-3'-phosphate
  modified_base 9: mod_base = OTHER; note = 2'-deoxy-2'-fluoroadenosine-3'-phosphate
  modified_base 10: mod_base = OTHER; note = 2'-deoxy-2'-fluorocytidine-3'-phosphate
  modified_base 11: mod_base = OTHER; note = 2'-deoxy-2'-fluorouridine-3'-phosphate
  modified_base 12: mod_base = OTHER; note = 2'-O-methylguanosine-3'-phosphate
  modified_base 13: mod_base = OTHER; note = 2'-O-methylcytidine-3'-phosphate
  modified_base 14: mod_base = OTHER; note = 2'-O-methylcytidine-3'-phosphate
  modified_base 15: mod_base = OTHER; note = 2'-O-methyluridine-3'-phosphate
  modified_base 16: mod_base = OTHER; note = 2'-O-methyluridine-3'-phosphate
  modified_base 17: mod_base = OTHER; note = 2'-O-methylcytidine-3'-phosphate
  modified_base 18: mod_base = OTHER; note = 2'-O-methyladenosine-3'-phosphate
  modified_base 19: mod_base = OTHER; note = 2'-O-methyladenosine-3'-phosphorothioate
  modified_base 20: mod_base = OTHER; note = 2'-O-methyladenosine-3'-phosphorothioate
  modified_base 21: mod_base = OTHER; note = 2'-O-methyladenosine
tacgacagactgccttcaaaa

SEQ ID NO: 772 - RNA, 21 nt, synthetic construct
  source 1..21: mol_type = other RNA
  modified_base 1: mod_base = OTHER; note = 2'-O-methylcytidine-3'-phosphorothioate
  modified_base 2: mod_base = OTHER; note = 2'-O-methyluridine-3'-phosphorothioate
  modified_base 3: mod_base = OTHER; note = 2'-O-methyluridine-3'-phosphate
  modified_base 4: mod_base = OTHER; note = 2'-O-methyluridine-3'-phosphate
  modified_base 5: mod_base = OTHER; note = 2'-O-methyladenosine-3'-phosphate
  modified_base 6: mod_base = OTHER; note = 2'-O-methylguanosine-3'-phosphate
  modified_base 7: mod_base = OTHER; note = 2'-O-methyluridine-3'-phosphate
  modified_base 8: mod_base = OTHER; note = 2'-O-methyladenosine-3'-phosphate
  modified_base 9: mod_base = OTHER; note = 2'-deoxy-2'-fluoroadenosine-3'-phosphate
  modified_base 10: mod_base = OTHER; note = 2'-deoxy-2'-fluoroadenosine-3'-phosphate
  modified_base 11: mod_base = OTHER; note = 2'-deoxy-2'-fluorouridine-3'-phosphate
  modified_base 12: mod_base = OTHER; note = 2'-O-methyladenosine-3'-phosphate
  modified_base 13: mod_base = OTHER; note = 2'-O-methyluridine-3'-phosphate
  modified_base 14: mod_base = OTHER; note = 2'-O-methyladenosine-3'-phosphate
  modified_base 15: mod_base = OTHER; note = 2'-O-methyladenosine-3'-phosphate
  modified_base 16: mod_base = OTHER; note = 2'-O-methyluridine-3'-phosphate
  modified_base 17: mod_base = OTHER; note = 2'-O-methylguanosine-3'-phosphate
  modified_base 18: mod_base = OTHER; note = 2'-O-methyladenosine-3'-phosphate
  modified_base 19: mod_base = OTHER; note = 2'-O-methylguanosine-3'-phosphorothioate
  modified_base 20: mod_base = OTHER; note = 2'-O-methylguanosine-3'-phosphorothioate
  modified_base 21: mod_base = OTHER; note = 2'-O-methyladenosine
ctttagtaaatataatgagga

SEQ ID NO: 773 - RNA, 21 nt, synthetic construct
  source 1..21: mol_type = other RNA
  modified_base 1: mod_base = OTHER; note = 2'-O-methyluridine-3'-phosphorothioate
  modified_base 2: mod_base = OTHER; note = 2'-O-methyladenosine-3'-phosphorothioate
  modified_base 3: mod_base = OTHER; note = 2'-O-methyluridine-3'-phosphate
  modified_base 4: mod_base = OTHER; note = 2'-O-methyladenosine-3'-phosphate
  modified_base 5: mod_base = OTHER; note = 2'-O-methyladenosine-3'-phosphate
  modified_base 6: mod_base = OTHER; note = 2'-O-methyluridine-3'-phosphate
  modified_base 7: mod_base = OTHER; note = 2'-O-methylguanosine-3'-phosphate
  modified_base 8: mod_base = OTHER; note = 2'-O-methyladenosine-3'-phosphate
  modified_base 9: mod_base = OTHER; note = 2'-deoxy-2'-fluoroguanosine-3'-phosphate
  modified_base 10: mod_base = OTHER; note = 2'-deoxy-2'-fluoroguanosine-3'-phosphate
  modified_base 11: mod_base = OTHER; note = 2'-deoxy-2'-fluoroadenosine-3'-phosphate
  modified_base 12: mod_base = OTHER; note = 2'-O-methylcytidine-3'-phosphate
  modified_base 13: mod_base = OTHER; note = 2'-O-methylcytidine-3'-phosphate
  modified_base 14: mod_base = OTHER; note = 2'-O-methyluridine-3'-phosphate
  modified_base 15: mod_base = OTHER; note = 2'-O-methyladenosine-3'-phosphate
  modified_base 16: mod_base = OTHER; note = 2'-O-methyluridine-3'-phosphate
  modified_base 17: mod_base = OTHER; note = 2'-O-methyladenosine-3'-phosphate
  modified_base 18: mod_base = OTHER; note = 2'-O-methylcytidine-3'-phosphate
  modified_base 19: mod_base = OTHER; note = 2'-O-methyluridine-3'-phosphorothioate
  modified_base 20: mod_base = OTHER; note = 2'-O-methyluridine-3'-phosphorothioate
  modified_base 21: mod_base = OTHER; note = 2'-O-methyladenosine
tataatgaggacctatactta

SEQ ID NO: 774 - RNA, 21 nt, synthetic construct
  source 1..21: mol_type = other RNA
  modified_base 1: mod_base = OTHER; note = 2'-O-methyladenosine-3'-phosphorothioate
  modified_base 2: mod_base = OTHER; note = 2'-O-methylguanosine-3'-phosphorothioate
  modified_base 3: mod_base = OTHER; note = 2'-O-methylcytidine-3'-phosphate
  modified_base 4: mod_base = OTHER; note = 2'-O-methyluridine-3'-phosphate
  modified_base 5: mod_base = OTHER; note = 2'-O-methylguanosine-3'-phosphate
  modified_base 6: mod_base = OTHER; note = 2'-O-methylguanosine-3'-phosphate
  modified_base 7: mod_base = OTHER; note = 2'-deoxy-2'-fluorouridine-3'-phosphate
  modified_base 8: mod_base = OTHER; note = 2'-O-methylguanosine-3'-phosphate
  modified_base 9: mod_base = OTHER; note = 2'-deoxy-2'-fluoroguanosine-3'-phosphate
  modified_base 10: mod_base = OTHER; note = 2'-deoxy-2'-fluoroadenosine-3'-phosphate
  modified_base 11: mod_base = OTHER; note = 2'-deoxy-2'-fluoroadenosine-3'-phosphate
  modified_base 12: mod_base = OTHER; note = 2'-O-methyluridine-3'-phosphate
  modified_base 13: mod_base = OTHER; note = 2'-O-methylguanosine-3'-phosphate
  modified_base 14: mod_base = OTHER; note = 2'-O-methylcytidine-3'-phosphate
  modified_base 15: mod_base = OTHER; note = 2'-O-methyladenosine-3'-phosphate
  modified_base 16: mod_base = OTHER; note = 2'-O-methyladenosine-3'-phosphate
  modified_base 17: mod_base = OTHER; note = 2'-O-methylguanosine-3'-phosphate
  modified_base 18: mod_base = OTHER; note = 2'-O-methylcytidine-3'-phosphate
  modified_base 19: mod_base = OTHER; note = 2'-O-methyluridine-3'-phosphorothioate
  modified_base 20: mod_base = OTHER; note = 2'-O-methyluridine-3'-phosphorothioate
  modified_base 21: mod_base = OTHER; note = 2'-O-methyladenosine
agctggtggaatgcaagctta

SEQ ID NO: 775 - RNA, 21 nt, synthetic construct
  source 1..21: mol_type = other RNA
  modified_base 1: mod_base = OTHER; note = 2'-O-methylcytidine-3'-phosphorothioate
  modified_base 2: mod_base = OTHER; note = 2'-O-methyladenosine-3'-phosphorothioate
  modified_base 3: mod_base = OTHER; note = 2'-O-methylguanosine-3'-phosphate
  modified_base 4: mod_base = OTHER; note = 2'-O-methyladenosine-3'-phosphate
  modified_base 5: mod_base = OTHER; note = 2'-O-methyluridine-3'-phosphate
  modified_base 6: mod_base = OTHER; note = 2'-O-methylcytidine-3'-phosphate
  modified_base 7: mod_base = OTHER; note = 2'-O-methylcytidine-3'-phosphate
  modified_base 8: mod_base = OTHER; note = 2'-O-methyladenosine-3'-phosphate
  modified_base 9: mod_base = OTHER; note = 2'-deoxy-2'-fluoroadenosine-3'-phosphate
  modified_base 10: mod_base = OTHER; note = 2'-deoxy-2'-fluoroguanosine-3'-phosphate
  modified_base 11: mod_base = OTHER; note = 2'-deoxy-2'-fluorouridine-3'-phosphate
  modified_base 12: mod_base = OTHER; note = 2'-O-methylcytidine-3'-phosphate
  modified_base 13: mod_base = OTHER; note = 2'-O-methyladenosine-3'-phosphate
  modified_base 14: mod_base = OTHER; note = 2'-O-methyladenosine-3'-phosphate
  modified_base 15: mod_base = OTHER; note = 2'-O-methylcytidine-3'-phosphate
  modified_base 16: mod_base = OTHER; note = 2'-O-methylguanosine-3'-phosphate
  modified_base 17: mod_base = OTHER; note = 2'-O-methyluridine-3'-phosphate
  modified_base 18: mod_base = OTHER; note = 2'-O-methylcytidine-3'-phosphate
  modified_base 19: mod_base = OTHER; note = 2'-O-methyluridine-3'-phosphorothioate
  modified_base 20: mod_base = OTHER; note = 2'-O-methyluridine-3'-phosphorothioate
  modified_base 21: mod_base = OTHER; note = 2'-O-methyladenosine
cagatccaagtcaacgtctta

SEQ ID NO: 776 - RNA, 21 nt, synthetic construct
  source 1..21: mol_type = other RNA
  modified_base 1: mod_base = OTHER; note = 2'-O-methylcytidine-3'-phosphorothioate
  modified_base 2: mod_base = OTHER; note = 2'-O-methylcytidine-3'-phosphorothioate
  modified_base 3: mod_base = OTHER; note = 2'-O-methyladenosine-3'-phosphate
  modified_base 4: mod_base = OTHER; note = 2'-O-methyladenosine-3'-phosphate
  modified_base 5: mod_base = OTHER; note = 2'-O-methylguanosine-3'-phosphate
  modified_base 6: mod_base = OTHER; note = 2'-O-methyluridine-3'-phosphate
  modified_base 7: mod_base = OTHER; note = 2'-deoxy-2'-fluorocytidine-3'-phosphate
  modified_base 8: mod_base = OTHER; note = 2'-O-methyladenosine-3'-phosphate
  modified_base 9: mod_base = OTHER; note = 2'-deoxy-2'-fluoroadenosine-3'-phosphate
  modified_base 10: mod_base = OTHER; note = 2'-deoxy-2'-fluorocytidine-3'-phosphate
  modified_base 11: mod_base = OTHER; note = 2'-deoxy-2'-fluoroguanosine-3'-phosphate
  modified_base 12: mod_base = OTHER; note = 2'-O-methyluridine-3'-phosphate
  modified_base 13: mod_base = OTHER; note = 2'-O-methylcytidine-3'-phosphate
  modified_base 14: mod_base = OTHER; note = 2'-O-methyluridine-3'-phosphate
  modified_base 15: mod_base = OTHER; note = 2'-O-methyluridine-3'-phosphate
  modified_base 16: mod_base = OTHER; note = 2'-O-methylguanosine-3'-phosphate
  modified_base 17: mod_base = OTHER; note = 2'-O-methyluridine-3'-phosphate
  modified_base 18: mod_base = OTHER; note = 2'-O-methyluridine-3'-phosphate
  modified_base 19: mod_base = OTHER; note = 2'-O-methylcytidine-3'-phosphorothioate
  modified_base 20: mod_base = OTHER; note = 2'-O-methyladenosine-3'-phosphorothioate
  modified_base 21: mod_base = OTHER; note = 2'-O-methyladenosine
ccaagtcaacgtcttgttcaa

SEQ ID NO: 777 - RNA, 21 nt, synthetic construct
  source 1..21: mol_type = other RNA
  modified_base 1: mod_base = OTHER; note = 2'-O-methylcytidine-3'-phosphorothioate
  modified_base 2: mod_base = OTHER; note = 2'-O-methylcytidine-3'-phosphorothioate
  modified_base 3: mod_base = OTHER; note = 2'-O-methyladenosine-3'-phosphate
  modified_base 4: mod_base = OTHER; note = 2'-O-methyladenosine-3'-phosphate
  modified_base 5: mod_base = OTHER; note = 2'-O-methylguanosine-3'-phosphate
  modified_base 6: mod_base = OTHER; note = 2'-O-methyluridine-3'-phosphate
  modified_base 7: mod_base = OTHER; note = 2'-O-methylcytidine-3'-phosphate
  modified_base 8: mod_base = OTHER; note = 2'-O-methyladenosine-3'-phosphate
  modified_base 9: mod_base = OTHER; note = 2'-deoxy-2'-fluoroadenosine-3'-phosphate
  modified_base 10: mod_base = OTHER; note = 2'-deoxy-2'-fluorocytidine-3'-phosphate
  modified_base 11: mod_base = OTHER; note = 2'-deoxy-2'-fluoroguanosine-3'-phosphate
  modified_base 12: mod_base = OTHER; note = 2'-O-methyluridine-3'-phosphate
  modified_base 13: mod_base = OTHER; note = 2'-O-methylcytidine-3'-phosphate
  modified_base 14: mod_base = OTHER; note = 2'-O-methyluridine-3'-phosphate
  modified_base 15: mod_base = OTHER; note = 2'-O-methyluridine-3'-phosphate
  modified_base 16: mod_base = OTHER; note = 2'-O-methylguanosine-3'-phosphate
  modified_base 17: mod_base = OTHER; note = 2'-O-methyluridine-3'-phosphate
  modified_base 18: mod_base = OTHER; note = 2'-O-methyluridine-3'-phosphate
  modified_base 19: mod_base = OTHER; note = 2'-O-methylcytidine-3'-phosphorothioate
  modified_base 20: mod_base = OTHER; note = 2'-O-methyladenosine-3'-phosphorothioate
  modified_base 21: mod_base = OTHER; note = 2'-O-methyladenosine
ccaagtcaacgtcttgttcaa

SEQ ID NO: 778 - RNA, 21 nt, synthetic construct
  source 1..21: mol_type = other RNA
  modified_base 1: mod_base = OTHER; note = 2'-O-methyladenosine-3'-phosphorothioate
  modified_base 2: mod_base = OTHER; note = 2'-O-methylguanosine-3'-phosphorothioate
  modified_base 3: mod_base = OTHER; note = 2'-O-methyladenosine-3'-phosphate
  modified_base 4: mod_base = OTHER; note = 2'-O-methyladenosine-3'-phosphate
  modified_base 5: mod_base = OTHER; note = 2'-O-methylcytidine-3'-phosphate
  modified_base 6: mod_base = OTHER; note = 2'-O-methyluridine-3'-phosphate
  modified_base 7: mod_base = OTHER; note = 2'-deoxy-2'-fluoroguanosine-3'-phosphate
  modified_base 8: mod_base = OTHER; note = 2'-O-methyluridine-3'-phosphate
  modified_base 9: mod_base = OTHER; note = 2'-deoxy-2'-fluorocytidine-3'-phosphate
  modified_base 10: mod_base = OTHER; note = 2'-deoxy-2'-fluorouridine-3'-phosphate
  modified_base 11: mod_base = OTHER; note = 2'-deoxy-2'-fluorouridine-3'-phosphate
  modified_base 12: mod_base = OTHER; note = 2'-O-methyluridine-3'-phosphate
  modified_base 13: mod_base = OTHER; note = 2'-O-methylguanosine-3'-phosphate
  modified_base 14: mod_base = OTHER; note = 2'-O-methylguanosine-3'-phosphate
  modified_base 15: mod_base = OTHER; note = 2'-O-methyladenosine-3'-phosphate
  modified_base 16: mod_base = OTHER; note = 2'-O-methylcytidine-3'-phosphate
  modified_base 17: mod_base = OTHER; note = 2'-O-methyluridine-3'-phosphate
  modified_base 18: mod_base = OTHER; note = 2'-O-methylcytidine-3'-phosphate
  modified_base 19: mod_base = OTHER; note = 2'-O-methyluridine-3'-phosphorothioate
  modified_base 20: mod_base = OTHER; note = 2'-O-methylcytidine-3'-phosphorothioate
  modified_base 21: mod_base = OTHER; note = 2'-O-methyladenosine
agaactgtctttggactctca

SEQ ID NO: 779 - RNA, 21 nt, synthetic construct
  source 1..21: mol_type = other RNA
  modified_base 1: mod_base = OTHER; note = 2'-O-methylcytidine-3'-phosphorothioate
  modified_base 2: mod_base = OTHER; note = 2'-O-methyluridine-3'-phosphorothioate
  modified_base 3: mod_base = OTHER; note = 2'-O-methyluridine-3'-phosphate
  modified_base 4: mod_base = OTHER; note = 2'-O-methyluridine-3'-phosphate
  modified_base 5: mod_base = OTHER; note = 2'-O-methylcytidine-3'-phosphate
  modified_base 6: mod_base = OTHER; note = 2'-O-methyladenosine-3'-phosphate
  modified_base 7: mod_base = OTHER; note = 2'-deoxy-2'-fluoroguanosine-3'-phosphate
  modified_base 8: mod_base = OTHER; note = 2'-O-methyladenosine-3'-phosphate
  modified_base 9: mod_base = OTHER; note = 2'-deoxy-2'-fluorouridine-3'-phosphate
  modified_base 10: mod_base = OTHER; note = 2'-deoxy-2'-fluoroguanosine-3'-phosphate
  modified_base 11: mod_base = OTHER; note = 2'-deoxy-2'-fluorocytidine-3'-phosphate
  modified_base 12: mod_base = OTHER; note = 2'-O-methyluridine-3'-phosphate
  modified_base 13: mod_base = OTHER; note = 2'-O-methylguanosine-3'-phosphate
  modified_base 14: mod_base = OTHER; note = 2'-O-methylcytidine-3'-phosphate
  modified_base 15: mod_base = OTHER; note = 2'-O-methyladenosine-3'-phosphate
  modified_base 16: mod_base = OTHER; note = 2'-O-methyladenosine-3'-phosphate
  modified_base 17: mod_base = OTHER; note = 2'-O-methylcytidine-3'-phosphate
  modified_base 18: mod_base = OTHER; note = 2'-O-methyluridine-3'-phosphate
  modified_base 19: mod_base = OTHER; note = 2'-O-methyladenosine-3'-phosphorothioate
  modified_base 20: mod_base = OTHER; note = 2'-O-methyladenosine-3'-phosphorothioate
  modified_base 21: mod_base = OTHER; note = 2'-O-methyladenosine
ctttcagatgctgcaactaaa

SEQ ID NO: 780 - RNA, 21 nt, synthetic construct
  source 1..21: mol_type = other RNA
  modified_base 1: mod_base = OTHER; note = 2'-O-methyluridine-3'-phosphorothioate
  modified_base 2: mod_base = OTHER; note = 2'-O-methylcytidine-3'-phosphorothioate
  modified_base 3: mod_base = OTHER; note = 2'-O-methyladenosine-3'-phosphate
  modified_base 4: mod_base = OTHER; note = 2'-O-methylguanosine-3'-phosphate
  modified_base 5: mod_base = OTHER; note = 2'-O-methyladenosine-3'-phosphate
  modified_base 6: mod_base = OTHER; note = 2'-O-methyluridine-3'-phosphate
  modified_base 7: mod_base = OTHER; note = 2'-deoxy-2'-fluoroguanosine-3'-phosphate
  modified_base 8: mod_base = OTHER; note = 2'-O-methylcytidine-3'-phosphate
  modified_base 9: mod_base = OTHER; note = 2'-deoxy-2'-fluorouridine-3'-phosphate
  modified_base 10: mod_base = OTHER; note = 2'-deoxy-2'-fluoroguanosine-3'-phosphate
  modified_base 11: mod_base = OTHER; note = 2'-deoxy-2'-fluorocytidine-3'-phosphate
  modified_base 12: mod_base = OTHER; note = 2'-O-methyladenosine-3'-phosphate
  modified_base 13: mod_base = OTHER; note = 2'-O-methyladenosine-3'-phosphate
  modified_base 14: mod_base = OTHER; note = 2'-O-methylcytidine-3'-phosphate
  modified_base 15: mod_base = OTHER; note = 2'-O-methyluridine-3'-phosphate
  modified_base 16: mod_base = OTHER; note = 2'-O-methyladenosine-3'-phosphate
  modified_base 17: mod_base = OTHER; note = 2'-O-methyladenosine-3'-phosphate
  modified_base 18: mod_base = OTHER; note = 2'-O-methyladenosine-3'-phosphate
  modified_base 19: mod_base = OTHER; note = 2'-O-methylcytidine-3'-phosphorothioate
  modified_base 20: mod_base = OTHER; note = 2'-O-methyladenosine-3'-phosphorothioate
  modified_base 21: mod_base = OTHER; note = 2'-O-methyladenosine
tcagatgctgcaactaaacaa

SEQ ID NO: 781 - RNA, 21 nt, synthetic construct
  source 1..21: mol_type = other RNA
  modified_base 1: mod_base = OTHER; note = 2'-O-methylguanosine-3'-phosphorothioate
  modified_base 2: mod_base = OTHER; note = 2'-O-methyladenosine-3'-phosphorothioate
  modified_base 3: mod_base = OTHER; note = 2'-O-methyluridine-3'-phosphate
  modified_base 4: mod_base = OTHER; note = 2'-O-methylguanosine-3'-phosphate
  modified_base 5: mod_base = OTHER; note = 2'-O-methylcytidine-3'-phosphate
  modified_base 6: mod_base = OTHER; note = 2'-O-methyluridine-3'-phosphate
  modified_base 7: mod_base = OTHER; note = 2'-deoxy-2'-fluoroguanosine-3'-phosphate
  modified_base 8: mod_base = OTHER; note = 2'-O-methylcytidine-3'-phosphate
  modified_base 9: mod_base = OTHER; note = 2'-deoxy-2'-fluoroadenosine-3'-phosphate
  modified_base 10: mod_base = OTHER; note = 2'-deoxy-2'-fluoroadenosine-3'-phosphate
  modified_base 11: mod_base = OTHER; note = 2'-deoxy-2'-fluorocytidine-3'-phosphate
  modified_base 12: mod_base = OTHER; note = 2'-O-methyluridine-3'-phosphate
  modified_base 13: mod_base = OTHER; note = 2'-O-methyladenosine-3'-phosphate
  modified_base 14: mod_base = OTHER; note = 2'-O-methyladenosine-3'-phosphate
  modified_base 15: mod_base = OTHER; note = 2'-O-methyladenosine-3'-phosphate
  modified_base 16: mod_base = OTHER; note = 2'-O-methylcytidine-3'-phosphate
  modified_base 17: mod_base = OTHER; note = 2'-O-methyladenosine-3'-phosphate
  modified_base 18: mod_base = OTHER; note = 2'-O-methylguanosine-3'-phosphate
  modified_base 19: mod_base = OTHER; note = 2'-O-methylguanosine-3'-phosphorothioate
  modified_base 20: mod_base = OTHER; note = 2'-O-methyladenosine-3'-phosphorothioate
  modified_base 21: mod_base = OTHER; note = 2'-O-methyladenosine
gatgctgcaactaaacaggaa

SEQ ID NO: 782 - RNA, 21 nt, synthetic construct
  source 1..21: mol_type = other RNA
  modified_base 1: mod_base = OTHER; note = 2'-O-methylcytidine-3'-phosphorothioate
  modified_base 2: mod_base = OTHER; note = 2'-O-methyluridine-3'-phosphorothioate
  modified_base 3: mod_base = OTHER; note = 2'-O-methylguanosine-3'-phosphate
  modified_base 4: mod_base = OTHER; note = 2'-O-methylcytidine-3'-phosphate
  modified_base 5: mod_base = OTHER; note = 2'-O-methyladenosine-3'-phosphate
  modified_base 6: mod_base = OTHER; note = 2'-O-methyladenosine-3'-phosphate
  modified_base 7: mod_base = OTHER; note = 2'-O-methylcytidine-3'-phosphate
  modified_base 8: mod_base = OTHER; note = 2'-O-methyluridine-3'-phosphate
  modified_base 9: mod_base = OTHER; note = 2'-deoxy-2'-fluoroadenosine-3'-phosphate
  modified_base 10: mod_base = OTHER; note = 2'-deoxy-2'-fluoroadenosine-3'-phosphate
  modified_base 11: mod_base = OTHER; note = 2'-deoxy-2'-fluoroadenosine-3'-phosphate
  modified_base 12: mod_base = OTHER; note = 2'-O-methylcytidine-3'-phosphate
  modified_base 13: mod_base = OTHER; note = 2'-O-methyladenosine-3'-phosphate
  modified_base 14: mod_base = OTHER; note = 2'-O-methylguanosine-3'-phosphate
  modified_base 15: mod_base = OTHER; note = 2'-O-methylguanosine-3'-phosphate
  modified_base 16: mod_base = OTHER; note = 2'-O-methyladenosine-3'-phosphate
  modified_base 17: mod_base = OTHER; note = 2'-O-methyladenosine-3'-phosphate
  modified_base 18: mod_base = OTHER; note = 2'-O-methylguanosine-3'-phosphate
  modified_base 19: mod_base = OTHER; note = 2'-O-methylguanosine-3'-phosphorothioate
  modified_base 20: mod_base = OTHER; note = 2'-O-methylguanosine-3'-phosphorothioate
  modified_base 21: mod_base = OTHER; note = 2'-O-methyladenosine
ctgcaactaaacaggaaggga

SEQ ID NO: 783 - RNA, 21 nt, synthetic construct
  source 1..21: mol_type = other RNA
  modified_base 1: mod_base = OTHER; note = 2'-O-methylguanosine-3'-phosphorothioate
  modified_base 2: mod_base = OTHER; note = 2'-O-methyladenosine-3'-phosphorothioate
  modified_base 3: mod_base = OTHER; note = 2'-O-methyladenosine-3'-phosphate
  modified_base 4: mod_base = OTHER; note = 2'-O-methylguanosine-3'-phosphate
  modified_base 5: mod_base = OTHER; note = 2'-O-methylguanosine-3'-phosphate
  modified_base 6: mod_base = OTHER; note = 2'-O-methylguanosine-3'-phosphate
  modified_base 7: mod_base = OTHER; note = 2'-deoxy-2'-fluoroadenosine-3'-phosphate
  modified_base 8: mod_base = OTHER; note = 2'-O-methyluridine-3'-phosphate
  modified_base 9: mod_base = OTHER; note = 2'-deoxy-2'-fluoroguanosine-3'-phosphate
  modified_base 10: mod_base = OTHER; note = 2'-deoxy-2'-fluoroguanosine-3'-phosphate
  modified_base 11: mod_base = OTHER; note = 2'-deoxy-2'-fluoroadenosine-3'-phosphate
  modified_base 12: mod_base = OTHER; note = 2'-O-methyladenosine-3'-phosphate
  modified_base 13: mod_base = OTHER; note = 2'-O-methylguanosine-3'-phosphate
  modified_base 14: mod_base = OTHER; note = 2'-O-methylguanosine-3'-phosphate
  modified_base 15: mod_base = OTHER; note = 2'-O-methyluridine-3'-phosphate
  modified_base 16: mod_base = OTHER; note = 2'-O-methylcytidine-3'-phosphate
  modified_base 17: mod_base = OTHER; note = 2'-O-methyluridine-3'-phosphate
  modified_base 18: mod_base = OTHER; note = 2'-O-methylcytidine-3'-phosphate
  modified_base 19: mod_base = OTHER; note = 2'-O-methylcytidine-3'-phosphorothioate
  modified_base 20: mod_base = OTHER; note = 2'-O-methyluridine-3'-phosphorothioate
  modified_base 21: mod_base = OTHER; note = 2'-O-methyladenosine
gaagggatggaaggtctccta

SEQ ID NO: 784 - RNA, 21 nt, synthetic construct
  source 1..21: mol_type = other RNA
  modified_base 1: mod_base = OTHER; note = 2'-O-methylcytidine-3'-phosphorothioate
  modified_base 2: mod_base = OTHER; note = 2'-O-methyluridine-3'-phosphorothioate
  modified_base 3: mod_base = OTHER; note = 2'-O-methyluridine-3'-phosphate
  modified_base 4: mod_base = OTHER; note = 2'-O-methylcytidine-3'-phosphate
  modified_base 5: mod_base = OTHER; note = 2'-O-methyluridine-3'-phosphate
  modified_base 6: mod_base = OTHER; note = 2'-O-methylguanosine-3'-phosphate
  modified_base 7: mod_base = OTHER; note = 2'-deoxy-2'-fluoroguanosine-3'-phosphate
  modified_base 8: mod_base = OTHER; note = 2'-O-methylguanosine-3'-phosphate
  modified_base 9: mod_base = OTHER; note = 2'-deoxy-2'-fluorouridine-3'-phosphate
  modified_base 10: mod_base = OTHER; note = 2'-deoxy-2'-fluorouridine-3'-phosphate
  modified_base 11: mod_base = OTHER; note = 2'-deoxy-2'-fluorocytidine-3'-phosphate
  modified_base 12: mod_base = OTHER; note = 2'-O-methyladenosine-3'-phosphate
  modified_base 13: mod_base = OTHER; note = 2'-O-methylguanosine-3'-phosphate
  modified_base 14: mod_base = OTHER; note = 2'-O-methyladenosine-3'-phosphate
  modified_base 15: mod_base = OTHER; note = 2'-O-methyluridine-3'-phosphate
  modified_base 16: mod_base = OTHER; note = 2'-O-methylguanosine-3'-phosphate
  modified_base 17: mod_base = OTHER; note = 2'-O-methyladenosine-3'-phosphate
  modified_base 18: mod_base = OTHER; note = 2'-O-methyluridine-3'-phosphate
  modified_base 19: mod_base = OTHER; note = 2'-O-methyladenosine-3'-phosphorothioate
  modified_base 20: mod_base = OTHER; note = 2'-O-methyluridine-3'-phosphorothioate
  modified_base 21: mod_base = OTHER; note = 2'-O-methyladenosine
cttctgggttcagatgatata

SEQ ID NO: 785 - RNA, 21 nt, synthetic construct
  source 1..21: mol_type = other RNA
  modified_base 1: mod_base = OTHER; note = 2'-O-methylcytidine-3'-phosphorothioate
  modified_base 2: mod_base = OTHER; note = 2'-O-methylcytidine-3'-phosphorothioate
  modified_base 3: mod_base = OTHER; note = 2'-O-methyluridine-3'-phosphate
  modified_base 4: mod_base = OTHER; note = 2'-O-methylguanosine-3'-phosphate
  modified_base 5: mod_base = OTHER; note = 2'-O-methyluridine-3'-phosphate
  modified_base 6: mod_base = OTHER; note = 2'-O-methylguanosine-3'-phosphate
  modified_base 7: mod_base = OTHER; note = 2'-O-methylcytidine-3'-phosphate
  modified_base 8: mod_base = OTHER; note = 2'-O-methyladenosine-3'-phosphate
  modified_base 9: mod_base = OTHER; note = 2'-deoxy-2'-fluoroguanosine-3'-phosphate
  modified_base 10: mod_base = OTHER; note = 2'-deoxy-2'-fluorocytidine-3'-phosphate
  modified_base 11: mod_base = OTHER; note = 2'-deoxy-2'-fluorouridine-3'-phosphate
  modified_base 12: mod_base = OTHER; note = 2'-O-methylguanosine-3'-phosphate
  modified_base 13: mod_base = OTHER; note = 2'-O-methylguanosine-3'-phosphate
  modified_base 14: mod_base = OTHER; note = 2'-O-methyladenosine-3'-phosphate
  modified_base 15: mod_base = OTHER; note = 2'-O-methyladenosine-3'-phosphate
  modified_base 16: mod_base = OTHER; note = 2'-O-methyluridine-3'-phosphate
  modified_base 17: mod_base = OTHER; note = 2'-O-methyluridine-3'-phosphate
  modified_base 18: mod_base = OTHER; note = 2'-O-methylcytidine-3'-phosphate
  modified_base 19: mod_base = OTHER; note = 2'-O-methyluridine-3'-phosphorothioate
  modified_base 20: mod_base = OTHER; note = 2'-O-methyluridine-3'-phosphorothioate
  modified_base 21: mod_base = OTHER; note = 2'-O-methyladenosine
cctgtgcagctggaattctta

SEQ ID NO: 786 - RNA, 21 nt, synthetic construct
  source 1..21: mol_type = other RNA
  modified_base 1: mod_base = OTHER; note = 2'-O-methyluridine-3'-phosphorothioate
  modified_base 2: mod_base = OTHER; note = 2'-O-methylguanosine-3'-phosphorothioate
  modified_base 3: mod_base = OTHER; note = 2'-O-methyluridine-3'-phosphate
  modified_base 4: mod_base = OTHER; note = 2'-O-methylguanosine-3'-phosphate
  modified_base 5: mod_base = OTHER; note = 2'-O-methylcytidine-3'-phosphate
  modified_base 6: mod_base = OTHER; note = 2'-O-methyladenosine-3'-phosphate
  modified_base 7: mod_base = OTHER; note = 2'-O-methylguanosine-3'-phosphate
  modified_base 8: mod_base = OTHER; note = 2'-O-methylcytidine-3'-phosphate
  modified_base 9: mod_base = OTHER; note = 2'-deoxy-2'-fluorouridine-3'-phosphate
  modified_base 10: mod_base = OTHER; note = 2'-deoxy-2'-fluoroguanosine-3'-phosphate
  modified_base 11: mod_base = OTHER; note = 2'-deoxy-2'-fluoroguanosine-3'-phosphate
  modified_base 12: mod_base = OTHER; note = 2'-O-methyladenosine-3'-phosphate
  modified_base 13: mod_base = OTHER; note = 2'-O-methyladenosine-3'-phosphate
  modified_base 14: mod_base = OTHER; note = 2'-O-methyluridine-3'-phosphate
  modified_base 15: mod_base = OTHER; note = 2'-O-methyluridine-3'-phosphate
  modified_base 16: mod_base = OTHER; note = 2'-O-methylcytidine-3'-phosphate
  modified_base 17: mod_base = OTHER; note = 2'-O-methyluridine-3'-phosphate
  modified_base 18: mod_base = OTHER; note = 2'-O-methyluridine-3'-phosphate
  modified_base 19: mod_base = OTHER; note = 2'-O-methyluridine-3'-phosphorothioate
  modified_base 20: mod_base = OTHER; note = 2'-O-methylcytidine-3'-phosphorothioate
  modified_base 21: mod_base = OTHER; note = 2'-O-methyladenosine
tgtgcagctggaattctttca

SEQ ID NO: 787 - RNA, 21 nt, synthetic construct
  source 1..21: mol_type = other RNA
  modified_base 1: mod_base = OTHER; note = 2'-O-methyladenosine-3'-phosphorothioate
  modified_base 2: mod_base = OTHER; note = 2'-O-methyladenosine-3'-phosphorothioate
  modified_base 3: mod_base = OTHER; note = 2'-O-methyluridine-3'-phosphate
  modified_base 4: mod_base = OTHER; note = 2'-O-methyluridine-3'-phosphate
  modified_base 5: mod_base = OTHER; note = 2'-O-methylcytidine-3'-phosphate
  modified_base 6: mod_base = OTHER; note = 2'-O-methyluridine-3'-phosphate
  modified_base 7: mod_base = OTHER; note = 2'-deoxy-2'-fluorouridine-3'-phosphate
  modified_base 8: mod_base = OTHER; note = 2'-O-methyluridine-3'-phosphate
  modified_base 9: mod_base = OTHER; note = 2'-deoxy-2'-fluorocytidine-3'-phosphate
  modified_base 10: mod_base = OTHER; note = 2'-deoxy-2'-fluorouridine-3'-phosphate
  modified_base 11: mod_base = OTHER; note = 2'-deoxy-2'-fluoroadenosine-3'-phosphate
  modified_base 12: mod_base = OTHER; note = 2'-O-methyladenosine-3'-phosphate
  modified_base 13: mod_base = OTHER; note = 2'-O-methylcytidine-3'-phosphate
  modified_base 14: mod_base = OTHER; note = 2'-O-methylcytidine-3'-phosphate
  modified_base 15: mod_base = OTHER; note = 2'-O-methyluridine-3'-phosphate
  modified_base 16: mod_base = OTHER; note = 2'-O-methylcytidine-3'-phosphate
  modified_base 17: mod_base = OTHER; note = 2'-O-methyladenosine-3'-phosphate
  modified_base 18: mod_base = OTHER; note = 2'-O-methylcytidine-3'-phosphate
  modified_base 19: mod_base = OTHER; note = 2'-O-methyluridine-3'-phosphorothioate
  modified_base 20: mod_base = OTHER; note = 2'-O-methyluridine-3'-phosphorothioate
  modified_base 21: mod_base = OTHER; note = 2'-O-methyladenosine
aattctttctaacctcactta

SEQ ID NO: 788 - RNA, 21 nt, synthetic construct
  source 1..21: mol_type = other RNA
  modified_base 1: mod_base = OTHER; note = 2'-O-methyluridine-3'-phosphorothioate
  modified_base 2: mod_base = OTHER; note = 2'-O-methyluridine-3'-phosphorothioate
  modified_base 3: mod_base = OTHER; note = 2'-O-methylcytidine-3'-phosphate
  modified_base 4: mod_base = OTHER; note = 2'-O-methyluridine-3'-phosphate
  modified_base 5: mod_base = OTHER; note = 2'-O-methyluridine-3'-phosphate
  modified_base 6: mod_base = OTHER; note = 2'-O-methyluridine-3'-phosphate
  modified_base 7: mod_base = OTHER; note = 2'-O-methylcytidine-3'-phosphate
  modified_base 8: mod_base = OTHER; note = 2'-O-methyluridine-3'-phosphate
  modified_base 9: mod_base = OTHER; note = 2'-deoxy-2'-fluoroadenosine-3'-phosphate
  modified_base 10: mod_base = OTHER; note = 2'-deoxy-2'-fluoroadenosine-3'-phosphate
  modified_base 11: mod_base = OTHER; note = 2'-deoxy-2'-fluorocytidine-3'-phosphate
  modified_base 12: mod_base = OTHER; note = 2'-O-methylcytidine-3'-phosphate
  modified_base 13: mod_base = OTHER; note = 2'-O-methyluridine-3'-phosphate
  modified_base 14: mod_base = OTHER; note = 2'-O-methylcytidine-3'-phosphate
  modified_base 15: mod_base = OTHER; note = 2'-O-methyladenosine-3'-phosphate
  modified_base 16: mod_base = OTHER; note = 2'-O-methylcytidine-3'-phosphate
  modified_base 17: mod_base = OTHER; note = 2'-O-methyluridine-3'-phosphate
  modified_base 18: mod_base = OTHER; note = 2'-O-methyluridine-3'-phosphate
  modified_base 19: mod_base = OTHER; note = 2'-O-methylguanosine-3'-phosphorothioate
  modified_base 20: mod_base = OTHER; note = 2'-O-methylcytidine-3'-phosphorothioate
  modified_base 21: mod_base = OTHER; note = 2'-O-methyladenosine
ttctttctaacctcacttgca

SEQ ID NO: 789 - RNA, 21 nt, synthetic construct
  source 1..21: mol_type = other RNA
  modified_base 1: mod_base = OTHER; note = 2'-O-methylcytidine-3'-phosphorothioate
  modified_base 2: mod_base = OTHER; note = 2'-O-methyluridine-3'-phosphorothioate
  modified_base 3: mod_base = OTHER; note = 2'-O-methyluridine-3'-phosphate
  modified_base 4: mod_base = OTHER; note = 2'-O-methyluridine-3'-phosphate
  modified_base 5: mod_base = OTHER; note = 2'-O-methylcytidine-3'-phosphate
  modified_base 6: mod_base = OTHER; note = 2'-O-methyluridine-3'-phosphate
  modified_base 7: mod_base = OTHER; note = 2'-deoxy-2'-fluoroadenosine-3'-phosphate
  modified_base 8: mod_base = OTHER; note = 2'-O-methyladenosine-3'-phosphate
  modified_base 9: mod_base = OTHER; note = 2'-deoxy-2'-fluorocytidine-3'-phosphate
  modified_base 10: mod_base = OTHER; note = 2'-deoxy-2'-fluorocytidine-3'-phosphate
  modified_base 11: mod_base = OTHER; note = 2'-deoxy-2'-fluorouridine-3'-phosphate
  modified_base 12: mod_base = OTHER; note = 2'-O-methylcytidine-3'-phosphate
  modified_base 13: mod_base = OTHER; note = 2'-O-methyladenosine-3'-phosphate
  modified_base 14: mod_base = OTHER; note = 2'-O-methylcytidine-3'-phosphate
  modified_base 15: mod_base = OTHER; note = 2'-O-methyluridine-3'-phosphate
  modified_base 16: mod_base = OTHER; note = 2'-O-methyluridine-3'-phosphate
  modified_base 17: mod_base = OTHER; note = 2'-O-methylguanosine-3'-phosphate
  modified_base 18: mod_base = OTHER; note = 2'-O-methylcytidine-3'-phosphate
  modified_base 19: mod_base = OTHER; note = 2'-O-methyladenosine-3'-phosphorothioate
  modified_base 20: mod_base = OTHER; note = 2'-O-methyladenosine-3'-phosphorothioate
  modified_base 21: mod_base = OTHER; note = 2'-O-methyladenosine
ctttctaacctcacttgcaaa

SEQ ID NO: 790 - RNA, 21 nt, synthetic construct
  source 1..21: mol_type = other RNA
  modified_base 1: mod_base = OTHER; note = 2'-O-methyluridine-3'-phosphorothioate
  modified_base 2: mod_base = OTHER; note = 2'-O-methyluridine-3'-phosphorothioate
  modified_base 3: mod_base = OTHER; note = 2'-O-methyluridine-3'-phosphate
  modified_base 4: mod_base = OTHER; note = 2'-O-methylcytidine-3'-phosphate
  modified_base 5: mod_base = OTHER; note = 2'-O-methyluridine-3'-phosphate
  modified_base 6: mod_base = OTHER; note = 2'-O-methyladenosine-3'-phosphate
  modified_base 7: mod_base = OTHER; note = 2'-deoxy-2'-fluoroadenosine-3'-phosphate
  modified_base 8: mod_base = OTHER; note = 2'-O-methylcytidine-3'-phosphate
  modified_base 9: mod_base = OTHER; note = 2'-deoxy-2'-fluorocytidine-3'-phosphate
  modified_base 10: mod_base = OTHER; note = 2'-deoxy-2'-fluorouridine-3'-phosphate
  modified_base 11: mod_base = OTHER; note = 2'-deoxy-2'-fluorocytidine-3'-phosphate
  modified_base 12: mod_base = OTHER; note = 2'-O-methyladenosine-3'-phosphate
  modified_base 13: mod_base = OTHER; note = 2'-O-methylcytidine-3'-phosphate
  modified_base 14: mod_base = OTHER; note = 2'-O-methyluridine-3'-phosphate
  modified_base 15: mod_base = OTHER; note = 2'-O-methyluridine-3'-phosphate
  modified_base 16: mod_base = OTHER; note = 2'-O-methylguanosine-3'-phosphate
  modified_base 17: mod_base = OTHER; note = 2'-O-methylcytidine-3'-phosphate
  modified_base 18: mod_base = OTHER; note = 2'-O-methyladenosine-3'-phosphate
  modified_base 19: mod_base = OTHER; note = 2'-O-methyladenosine-3'-phosphorothioate
  modified_base 20: mod_base = OTHER; note = 2'-O-methyluridine-3'-phosphorothioate
  modified_base 21: mod_base = OTHER; note = 2'-O-methyladenosine
tttctaacctcacttgcaata

SEQ ID NO: 791 - RNA, 21 nt, synthetic construct
  source 1..21: mol_type = other RNA
  modified_base 1: mod_base = OTHER; note = 2'-O-methylcytidine-3'-phosphorothioate
  modified_base 2: mod_base = OTHER; note = 2'-O-methyluridine-3'-phosphorothioate
  modified_base 3: mod_base = OTHER; note = 2'-O-methyladenosine-3'-phosphate
  modified_base 4: mod_base = OTHER; note = 2'-O-methyladenosine-3'-phosphate
  modified_base 5: mod_base = OTHER; note = 2'-O-methylcytidine-3'-phosphate
  modified_base 6: mod_base = OTHER; note = 2'-O-methylcytidine-3'-phosphate
  modified_base 7: mod_base = OTHER; note = 2'-O-methyluridine-3'-phosphate
  modified_base 8: mod_base = OTHER; note = 2'-O-methylcytidine-3'-phosphate
  modified_base 9: mod_base = OTHER; note = 2'-deoxy-2'-fluoroadenosine-3'-phosphate
  modified_base 10: mod_base = OTHER; note = 2'-deoxy-2'-fluorocytidine-3'-phosphate
  modified_base 11: mod_base = OTHER; note = 2'-deoxy-2'-fluorouridine-3'-phosphate
  modified_base 12: mod_base = OTHER; note = 2'-O-methyluridine-3'-phosphate
  modified_base 13: mod_base = OTHER; note = 2'-O-methylguanosine-3'-phosphate
  modified_base 14: mod_base = OTHER; note = 2'-O-methylcytidine-3'-phosphate
  modified_base 15: mod_base = OTHER; note = 2'-O-methyladenosine-3'-phosphate
  modified_base 16: mod_base = OTHER; note = 2'-O-methyladenosine-3'-phosphate
  modified_base 17: mod_base = OTHER; note = 2'-O-methyluridine-3'-phosphate
  modified_base 18: mod_base = OTHER; note = 2'-O-methyladenosine-3'-phosphate
  modified_base 19: mod_base = OTHER; note = 2'-O-methyladenosine-3'-phosphorothioate
  modified_base 20: mod_base = OTHER; note = 2'-O-methyluridine-3'-phosphorothioate
  modified_base 21: mod_base = OTHER; note = 2'-O-methyladenosine
ctaacctcacttgcaataata

SEQ ID NO: 792 - RNA, 21 nt, synthetic construct
  source 1..21: mol_type = other RNA
  modified_base 1: mod_base = OTHER; note = 2'-O-methyluridine-3'-phosphorothioate
  modified_base 2: mod_base = OTHER; note = 2'-O-methyladenosine-3'-phosphorothioate
  modified_base 3: mod_base = OTHER; note = 2'-O-methyladenosine-3'-phosphate
  modified_base 4: mod_base = OTHER; note = 2'-O-methylcytidine-3'-phosphate
  modified_base 5: mod_base = OTHER; note = 2'-O-methylcytidine-3'-phosphate
  modified_base 6: mod_base = OTHER; note = 2'-O-methyluridine-3'-phosphate
  modified_base 7: mod_base = OTHER; note = 2'-O-methylcytidine-3'-phosphate
  modified_base 8: mod_base = OTHER; note = 2'-O-methyladenosine-3'-phosphate
  modified_base 9: mod_base = OTHER; note = 2'-deoxy-2'-fluorocytidine-3'-phosphate
  modified_base 10: mod_base = OTHER; note = 2'-deoxy-2'-fluorouridine-3'-phosphate
  modified_base 11: mod_base = OTHER; note = 2'-deoxy-2'-fluorouridine-3'-phosphate
  modified_base 12: mod_base = OTHER; note = 2'-O-methylguanosine-3'-phosphate
  modified_base 13: mod_base = OTHER; note = 2'-O-methylcytidine-3'-phosphate
  modified_base 14: mod_base = OTHER; note = 2'-O-methyladenosine-3'-phosphate
  modified_base 15: mod_base = OTHER; note = 2'-O-methyladenosine-3'-phosphate
  modified_base 16: mod_base = OTHER; note = 2'-O-methyluridine-3'-phosphate
  modified_base 17: mod_base = OTHER; note = 2'-O-methyladenosine-3'-phosphate
  modified_base 18: mod_base = OTHER; note = 2'-O-methyladenosine-3'-phosphate
  modified_base 19: mod_base = OTHER; note = 2'-O-methyluridine-3'-phosphorothioate
  modified_base 20: mod_base = OTHER; note = 2'-O-methyluridine-3'-phosphorothioate
  modified_base 21: mod_base = OTHER; note = 2'-O-methyladenosine
taacctcacttgcaataatta

SEQ ID NO: 793 - RNA, 21 nt, synthetic construct
  source 1..21: mol_type = other RNA
  modified_base 1: mod_base = OTHER; note = 2'-O-methyladenosine-3'-phosphorothioate
  modified_base 2: mod_base = OTHER; note = 2'-O-methyladenosine-3'-phosphorothioate
  modified_base 3: mod_base = OTHER; note = 2'-O-methylcytidine-3'-phosphate
  modified_base 4: mod_base = OTHER; note = 2'-O-methylcytidine-3'-phosphate
  modified_base 5: mod_base = OTHER; note = 2'-O-methyluridine-3'-phosphate
  modified_base 6: mod_base = OTHER; note = 2'-O-methylcytidine-3'-phosphate
  modified_base 7: mod_base = OTHER; note = 2'-O-methyladenosine-3'-phosphate
  modified_base 8: mod_base = OTHER; note = 2'-O-methylcytidine-3'-phosphate
  modified_base 9: mod_base = OTHER; note = 2'-deoxy-2'-fluorouridine-3'-phosphate
  modified_base 10: mod_base = OTHER; note = 2'-deoxy-2'-fluorouridine-3'-phosphate
  modified_base 11: mod_base = OTHER; note = 2'-deoxy-2'-fluoroguanosine-3'-phosphate
  modified_base 12: mod_base = OTHER; note = 2'-O-methylcytidine-3'-phosphate
  modified_base 13: mod_base = OTHER; note = 2'-O-methyladenosine-3'-phosphate
  modified_base 14: mod_base = OTHER; note = 2'-O-methyladenosine-3'-phosphate
  modified_base 15: mod_base = OTHER; note = 2'-O-methyluridine-3'-phosphate
  modified_base 16: mod_base = OTHER; note = 2'-O-methyladenosine-3'-phosphate
  modified_base 17: mod_base = OTHER; note = 2'-O-methyladenosine-3'-phosphate
  modified_base 18: mod_base = OTHER; note = 2'-O-methyluridine-3'-phosphate
  modified_base 19: mod_base = OTHER; note = 2'-O-methyluridine-3'-phosphorothioate
  modified_base 20: mod_base = OTHER; note = 2'-O-methyladenosine-3'-phosphorothioate
  modified_base 21: mod_base = OTHER; note = 2'-O-methyladenosine
aacctcacttgcaataattaa

SEQ ID NO: 794 - RNA, 21 nt, synthetic construct
  source 1..21: mol_type = other RNA
  modified_base 1: mod_base = OTHER; note = 2'-O-methyladenosine-3'-phosphorothioate
  modified_base 2: mod_base = OTHER; note = 2'-O-methylcytidine-3'-phosphorothioate
  modified_base 3: mod_base = OTHER; note = 2'-O-methylcytidine-3'-phosphate
  modified_base 4: mod_base = OTHER; note = 2'-O-methyluridine-3'-phosphate
  modified_base 5: mod_base = OTHER; note = 2'-O-methylcytidine-3'-phosphate
  modified_base 6: mod_base = OTHER; note = 2'-O-methyladenosine-3'-phosphate
  modified_base 7: mod_base = OTHER; note = 2'-O-methylcytidine-3'-phosphate
  modified_base 8: mod_base = OTHER; note = 2'-O-methyluridine-3'-phosphate
  modified_base 9: mod_base = OTHER; note = 2'-deoxy-2'-fluorouridine-3'-phosphate
  modified_base 10: mod_base = OTHER; note = 2'-deoxy-2'-fluoroguanosine-3'-phosphate
  modified_base 11: mod_base = OTHER; note = 2'-deoxy-2'-fluorocytidine-3'-phosphate
  modified_base 12: mod_base = OTHER; note = 2'-O-methyladenosine-3'-phosphate
  modified_base 13: mod_base = OTHER; note = 2'-O-methyladenosine-3'-phosphate
  modified_base 14: mod_base = OTHER; note = 2'-O-methyluridine-3'-phosphate
  modified_base 15: mod_base = OTHER; note = 2'-O-methyladenosine-3'-phosphate
  modified_base 16: mod_base = OTHER; note = 2'-O-methyladenosine-3'-phosphate
  modified_base 17: mod_base = OTHER; note = 2'-O-methyluridine-3'-phosphate
  modified_base 18: mod_base = OTHER; note = 2'-O-methyluridine-3'-phosphate
  modified_base 19: mod_base = OTHER; note = 2'-O-methyladenosine-3'-phosphorothioate
  modified_base 20: mod_base = OTHER; note = 2'-O-methyluridine-3'-phosphorothioate
  modified_base 21: mod_base = OTHER; note = 2'-O-methyladenosine
acctcacttgcaataattata

SEQ ID NO: 795 - RNA, 21 nt, synthetic construct
  source 1..21: mol_type = other RNA
  modified_base 1: mod_base = OTHER; note = 2'-O-methylcytidine-3'-phosphorothioate
  modified_base 2: mod_base = OTHER; note = 2'-O-methylcytidine-3'-phosphorothioate
  modified_base 3: mod_base = OTHER; note = 2'-O-methyluridine-3'-phosphate
  modified_base 4: mod_base = OTHER; note = 2'-O-methylcytidine-3'-phosphate
  modified_base 5: mod_base = OTHER; note = 2'-O-methyladenosine-3'-phosphate
  modified_base 6: mod_base = OTHER; note = 2'-O-methylcytidine-3'-phosphate
  modified_base 7: mod_base = OTHER; note = 2'-O-methyluridine-3'-phosphate
  modified_base 8: mod_base = OTHER; note = 2'-O-methyluridine-3'-phosphate
  modified_base 9: mod_base = OTHER; note = 2'-deoxy-2'-fluoroguanosine-3'-phosphate
  modified_base 10: mod_base = OTHER; note = 2'-deoxy-2'-fluorocytidine-3'-phosphate
  modified_base 11: mod_base = OTHER; note = 2'-deoxy-2'-fluoroadenosine-3'-phosphate
  modified_base 12: mod_base = OTHER; note = 2'-O-methyladenosine-3'-phosphate
  modified_base 13: mod_base = OTHER; note = 2'-O-methyluridine-3'-phosphate
  modified_base 14: mod_base = OTHER; note = 2'-O-methyladenosine-3'-phosphate
  modified_base 15: mod_base = OTHER; note = 2'-O-methyladenosine-3'-phosphate
  modified_base 16: mod_base = OTHER; note = 2'-O-methyluridine-3'-phosphate
  modified_base 17: mod_base = OTHER; note = 2'-O-methyluridine-3'-phosphate
  modified_base 18: mod_base = OTHER; note = 2'-O-methyladenosine-3'-phosphate
  modified_base 19: mod_base = OTHER; note = 2'-O-methyluridine-3'-phosphorothioate
  modified_base 20: mod_base = OTHER; note = 2'-O-methyladenosine-3'-phosphorothioate
  modified_base 21: mod_base = OTHER; note = 2'-O-methyladenosine
cctcacttgcaataattataa

SEQ ID NO: 796 - RNA, 21 nt, synthetic construct
  source 1..21: mol_type = other RNA
  modified_base 1: mod_base = OTHER; note = 2'-O-methylcytidine-3'-phosphorothioate
  modified_base 2: mod_base = OTHER; note = 2'-O-methyluridine-3'-phosphorothioate
  modified_base 3: mod_base = OTHER; note = 2'-O-methylcytidine-3'-phosphate
  modified_base 4: mod_base = OTHER; note = 2'-O-methyladenosine-3'-phosphate
  modified_base 5: mod_base = OTHER; note = 2'-O-methylcytidine-3'-phosphate
  modified_base 6: mod_base = OTHER; note = 2'-O-methyluridine-3'-phosphate
  modified_base 7: mod_base = OTHER; note = 2'-deoxy-2'-fluorouridine-3'-phosphate
  modified_base 8: mod_base = OTHER; note = 2'-O-methylguanosine-3'-phosphate
  modified_base 9: mod_base = OTHER; note = 2'-deoxy-2'-fluorocytidine-3'-phosphate
  modified_base 10: mod_base = OTHER; note = 2'-deoxy-2'-fluoroadenosine-3'-phosphate
  modified_base 11: mod_base = OTHER; note = 2'-deoxy-2'-fluoroadenosine-3'-phosphate
  modified_base 12: mod_base = OTHER; note = 2'-O-methyluridine-3'-phosphate
  modified_base 13: mod_base = OTHER; note = 2'-O-methyladenosine-3'-phosphate
  modified_base 14: mod_base = OTHER; note = 2'-O-methyladenosine-3'-phosphate
  modified_base 15: mod_base = OTHER; note = 2'-O-methyluridine-3'-phosphate
  modified_base 16: mod_base = OTHER; note = 2'-O-methyluridine-3'-phosphate
  modified_base 17: mod_base = OTHER; note = 2'-O-methyladenosine-3'-phosphate
  modified_base 18: mod_base = OTHER; note = 2'-O-methyluridine-3'-phosphate
  modified_base 19: mod_base = OTHER; note = 2'-O-methyladenosine-3'-phosphorothioate
  modified_base 20: mod_base = OTHER; note = 2'-O-methyladenosine-3'-phosphorothioate
  modified_base 21: mod_base = OTHER; note = 2'-O-methyladenosine
ctcacttgcaataattataaa

SEQ ID NO: 797 - RNA, 21 nt, synthetic construct
  source 1..21: mol_type = other RNA
  modified_base 1: mod_base = OTHER; note = 2'-O-methylcytidine-3'-phosphorothioate
  modified_base 2: mod_base = OTHER; note = 2'-O-methyluridine-3'-phosphorothioate
  modified_base 3: mod_base = OTHER; note = 2'-O-methylcytidine-3'-phosphate
  modified_base 4: mod_base = OTHER; note = 2'-O-methyladenosine-3'-phosphate
  modified_base 5: mod_base = OTHER; note = 2'-O-methylcytidine-3'-phosphate
  modified_base 6: mod_base = OTHER; note = 2'-O-methyluridine-3'-phosphate
  modified_base 7: mod_base = OTHER; note = 2'-O-methyluridine-3'-phosphate
  modified_base 8: mod_base = OTHER; note = 2'-O-methylguanosine-3'-phosphate
  modified_base 9: mod_base = OTHER; note = 2'-deoxy-2'-fluorocytidine-3'-phosphate
  modified_base 10: mod_base = OTHER; note = 2'-deoxy-2'-fluoroadenosine-3'-phosphate
  modified_base 11: mod_base = OTHER; note = 2'-deoxy-2'-fluoroadenosine-3'-phosphate
  modified_base 12: mod_base = OTHER; note = 2'-O-methyluridine-3'-phosphate
  modified_base 13: mod_base = OTHER; note = 2'-O-methyladenosine-3'-phosphate
  modified_base 14: mod_base = OTHER; note = 2'-O-methyladenosine-3'-phosphate
  modified_base 15: mod_base = OTHER; note = 2'-O-methyluridine-3'-phosphate
  modified_base 16: mod_base = OTHER; note = 2'-O-methyluridine-3'-phosphate
  modified_base 17: mod_base = OTHER; note = 2'-O-methyladenosine-3'-phosphate
  modified_base 18: mod_base = OTHER; note = 2'-O-methyluridine-3'-phosphate
  modified_base 19: mod_base = OTHER; note = 2'-O-methyladenosine-3'-phosphorothioate
  modified_base 20: mod_base = OTHER; note = 2'-O-methyladenosine-3'-phosphorothioate
  modified_base 21: mod_base = OTHER; note = 2'-O-methyladenosine
ctcacttgcaataattataaa

SEQ ID NO: 798 - RNA, 21 nt, synthetic construct
  source 1..21: mol_type = other RNA
  modified_base 1: mod_base = OTHER; note = 2'-O-methyluridine-3'-phosphorothioate
  modified_base 2: mod_base = OTHER; note = 2'-O-methylcytidine-3'-phosphorothioate
  modified_base 3: mod_base = OTHER; note = 2'-O-methyladenosine-3'-phosphate
  modified_base 4: mod_base = OTHER; note = 2'-O-methylcytidine-3'-phosphate
  modified_base 5: mod_base = OTHER; note = 2'-O-methyluridine-3'-phosphate
  modified_base 6: mod_base = OTHER; note = 2'-O-methyluridine-3'-phosphate
  modified_base 7: mod_base = OTHER; note = 2'-O-methylguanosine-3'-phosphate
  modified_base 8: mod_base = OTHER; note = 2'-O-methylcytidine-3'-phosphate
  modified_base 9: mod_base = OTHER; note = 2'-deoxy-2'-fluoroadenosine-3'-phosphate
  modified_base 10: mod_base = OTHER; note = 2'-deoxy-2'-fluoroadenosine-3'-phosphate
  modified_base 11: mod_base = OTHER; note = 2'-deoxy-2'-fluorouridine-3'-phosphate
  modified_base 12: mod_base = OTHER; note = 2'-O-methyladenosine-3'-phosphate
  modified_base 13: mod_base = OTHER; note = 2'-O-methyladenosine-3'-phosphate
  modified_base 14: mod_base = OTHER; note = 2'-O-methyluridine-3'-phosphate
  modified_base 15: mod_base = OTHER; note = 2'-O-methyluridine-3'-phosphate
  modified_base 16: mod_base = OTHER; note = 2'-O-methyladenosine-3'-phosphate
  modified_base 17: mod_base = OTHER; note = 2'-O-methyluridine-3'-phosphate
  modified_base 18: mod_base = OTHER; note = 2'-O-methyladenosine-3'-phosphate
  modified_base 19: mod_base = OTHER; note = 2'-O-methyladenosine-3'-phosphorothioate
  modified_base 20: mod_base = OTHER; note = 2'-O-methylguanosine-3'-phosphorothioate
  modified_base 21: mod_base = OTHER; note = 2'-O-methyladenosine
tcacttgcaataattataaga

SEQ ID NO: 799 - RNA, 21 nt, synthetic construct
  source 1..21: mol_type = other RNA
  modified_base 1: mod_base = OTHER; note = 2'-O-methylcytidine-3'-phosphorothioate
  modified_base 2: mod_base = OTHER; note = 2'-O-methyladenosine-3'-phosphorothioate
  modified_base 3: mod_base = OTHER; note = 2'-O-methylcytidine-3'-phosphate
  modified_base 4: mod_base = OTHER; note = 2'-O-methyluridine-3'-phosphate
  modified_base 5: mod_base = OTHER; note = 2'-O-methyluridine-3'-phosphate
  modified_base 6: mod_base = OTHER; note = 2'-O-methylguanosine-3'-phosphate
  modified_base 7: mod_base = OTHER; note = 2'-O-methylcytidine-3'-phosphate
  modified_base 8: mod_base = OTHER; note = 2'-O-methyladenosine-3'-phosphate
  modified_base 9: mod_base = OTHER; note = 2'-deoxy-2'-fluoroadenosine-3'-phosphate
  modified_base 10: mod_base = OTHER; note = 2'-deoxy-2'-fluorouridine-3'-phosphate
  modified_base 11: mod_base = OTHER; note = 2'-deoxy-2'-fluoroadenosine-3'-phosphate
  modified_base 12: mod_base = OTHER; note = 2'-O-methyladenosine-3'-phosphate
  modified_base 13: mod_base = OTHER; note = 2'-O-methyluridine-3'-phosphate
  modified_base 14: mod_base = OTHER; note = 2'-O-methyluridine-3'-phosphate
  modified_base 15: mod_base = OTHER; note = 2'-O-methyladenosine-3'-phosphate
  modified_base 16: mod_base = OTHER; note = 2'-O-methyluridine-3'-phosphate
  modified_base 17: mod_base = OTHER; note = 2'-O-methyladenosine-3'-phosphate
  modified_base 18: mod_base = OTHER; note = 2'-O-methyladenosine-3'-phosphate
  modified_base 19: mod_base = OTHER; note = 2'-O-methylguanosine-3'-phosphorothioate
  modified_base 20: mod_base = OTHER; note = 2'-O-methyladenosine-3'-phosphorothioate
  modified_base 21: mod_base = OTHER; note = 2'-O-methyladenosine
cacttgcaataattataagaa

SEQ ID NO: 800 - RNA, 21 nt, synthetic construct
  source 1..21: mol_type = other RNA
  modified_base 1: mod_base = OTHER; note = 2'-O-methylcytidine-3'-phosphorothioate
  modified_base 2: mod_base = OTHER; note = 2'-O-methyladenosine-3'-phosphorothioate
  modified_base 3: mod_base = OTHER; note = 2'-O-methyladenosine-3'-phosphate
  modified_base 4: mod_base = OTHER; note = 2'-O-methylguanosine-3'-phosphate
  modified_base 5: mod_base = OTHER; note = 2'-O-methyluridine-3'-phosphate
  modified_base 6: mod_base = OTHER; note = 2'-O-methylguanosine-3'-phosphate
  modified_base 7: mod_base = OTHER; note = 2'-deoxy-2'-fluoroguanosine-3'-phosphate
  modified_base 8: mod_base = OTHER; note = 2'-O-methylguanosine-3'-phosphate
  modified_base 9: mod_base = OTHER; note = 2'-deoxy-2'-fluorouridine-3'-phosphate
  modified_base 10: mod_base = OTHER; note = 2'-deoxy-2'-fluoroguanosine-3'-phosphate
  modified_base 11: mod_base = OTHER; note = 2'-deoxy-2'-fluoroguanosine-3'-phosphate
  modified_base 12: mod_base = OTHER; note = 2'-O-methyluridine-3'-phosphate
  modified_base 13: mod_base = OTHER; note = 2'-O-methyladenosine-3'-phosphate
  modified_base 14: mod_base = OTHER; note = 2'-O-methyluridine-3'-phosphate
  modified_base 15: mod_base = OTHER; note = 2'-O-methyladenosine-3'-phosphate
  modified_base 16: mod_base = OTHER; note = 2'-O-methylguanosine-3'-phosphate
  modified_base 17: mod_base = OTHER; note = 2'-O-methyladenosine-3'-phosphate
  modified_base 18: mod_base = OTHER; note = 2'-O-methylguanosine-3'-phosphate
  modified_base 19: mod_base = OTHER; note = 2'-O-methylguanosine-3'-phosphorothioate
  modified_base 20: mod_base = OTHER; note = 2'-O-methylcytidine-3'-phosphorothioate
  modified_base 21: mod_base = OTHER; note = 2'-O-methyladenosine
caagtgggtggtatagaggca

SEQ ID NO: 801 - RNA, 21 nt, synthetic construct
  source 1..21: mol_type = other RNA
  modified_base 1: mod_base = OTHER; note = 2'-O-methylguanosine-3'-phosphorothioate
  modified_base 2: mod_base = OTHER; note = 2'-O-methylcytidine-3'-phosphorothioate
  modified_base 3: mod_base = OTHER; note = 2'-O-methyluridine-3'-phosphate
  modified_base 4: mod_base = OTHER; note = 2'-O-methylcytidine-3'-phosphate
  modified_base 5: mod_base = OTHER; note = 2'-O-methyluridine-3'-phosphate
  modified_base 6: mod_base = OTHER; note = 2'-O-methyluridine-3'-phosphate
  modified_base 7: mod_base = OTHER; note = 2'-deoxy-2'-fluoroguanosine-3'-phosphate
  modified_base 8: mod_base = OTHER; note = 2'-O-methyluridine-3'-phosphate
  modified_base 9: mod_base = OTHER; note = 2'-deoxy-2'-fluoroguanosine-3'-phosphate
  modified_base 10: mod_base = OTHER; note = 2'-deoxy-2'-fluorocytidine-3'-phosphate
  modified_base 11: mod_base = OTHER; note = 2'-deoxy-2'-fluoroguanosine-3'-phosphate
  modified_base 12: mod_base = OTHER; note = 2'-O-methyluridine-3'-phosphate
  modified_base 13: mod_base = OTHER; note = 2'-O-methyladenosine-3'-phosphate
  modified_base 14: mod_base = OTHER; note = 2'-O-methylcytidine-3'-phosphate
  modified_base 15: mod_base = OTHER; note = 2'-O-methyluridine-3'-phosphate
  modified_base 16: mod_base = OTHER; note = 2'-O-methylguanosine-3'-phosphate
  modified_base 17: mod_base = OTHER; note = 2'-O-methyluridine-3'-phosphate
  modified_base 18: mod_base = OTHER; note = 2'-O-methylcytidine-3'-phosphate
  modified_base 19: mod_base = OTHER; note = 2'-O-methylcytidine-3'-phosphorothioate
  modified_base 20: mod_base = OTHER; note = 2'-O-methyluridine-3'-phosphorothioate
  modified_base 21: mod_base = OTHER; note = 2'-O-methyladenosine
gctcttgtgcgtactgtccta

SEQ ID NO: 802 - RNA, 21 nt, synthetic construct
  source 1..21: mol_type = other RNA
  modified_base 1: mod_base = OTHER; note = 2'-O-methylcytidine-3'-phosphorothioate
  modified_base 2: mod_base = OTHER; note = 2'-O-methylcytidine-3'-phosphorothioate
  modified_base 3: mod_base = OTHER; note = 2'-O-methyluridine-3'-phosphate
  modified_base 4: mod_base = OTHER; note = 2'-O-methylguanosine-3'-phosphate
  modified_base 5: mod_base = OTHER; note = 2'-O-methylcytidine-3'-phosphate
  modified_base 6: mod_base = OTHER; note = 2'-O-methylcytidine-3'-phosphate
  modified_base 7: mod_base = OTHER; note = 2'-O-methyladenosine-3'-phosphate
  modified_base 8: mod_base = OTHER; note = 2'-O-methyluridine-3'-phosphate
  modified_base 9: mod_base = OTHER; note = 2'-deoxy-2'-fluorocytidine-3'-phosphate
  modified_base 10: mod_base = OTHER; note = 2'-deoxy-2'-fluorouridine-3'-phosphate
  modified_base 11: mod_base = OTHER; note = 2'-deoxy-2'-fluoroguanosine-3'-phosphate
  modified_base 12: mod_base = OTHER; note = 2'-O-methyluridine-3'-phosphate
  modified_base 13: mod_base = OTHER; note = 2'-O-methylguanosine-3'-phosphate
  modified_base 14: mod_base = OTHER; note = 2'-O-methylcytidine-3'-phosphate
  modified_base 15: mod_base = OTHER; note = 2'-O-methyluridine-3'-phosphate
  modified_base 16: mod_base = OTHER; note = 2'-O-methylcytidine-3'-phosphate
  modified_base 17: mod_base = OTHER; note = 2'-O-methyluridine-3'-phosphate
  modified_base 18: mod_base = OTHER; note = 2'-O-methyluridine-3'-phosphate
  modified_base 19: mod_base = OTHER; note = 2'-O-methylcytidine-3'-phosphorothioate
  modified_base 20: mod_base = OTHER; note = 2'-O-methylguanosine-3'-phosphorothioate
  modified_base 21: mod_base = OTHER; note = 2'-O-methyladenosine
cctgccatctgtgctcttcga

SEQ ID NO: 803 - RNA, 21 nt, synthetic construct
  source 1..21: mol_type = other RNA
  modified_base 1: mod_base = OTHER; note = 2'-O-methylcytidine-3'-phosphorothioate
  modified_base 2: mod_base = OTHER; note = 2'-O-methyluridine-3'-phosphorothioate
  modified_base 3: mod_base = OTHER; note = 2'-O-methylguanosine-3'-phosphate
  modified_base 4: mod_base = OTHER; note = 2'-O-methylcytidine-3'-phosphate
  modified_base 5: mod_base = OTHER; note = 2'-O-methylcytidine-3'-phosphate
  modified_base 6: mod_base = OTHER; note = 2'-O-methyladenosine-3'-phosphate
  modified_base 7: mod_base = OTHER; note = 2'-O-methyluridine-3'-phosphate
  modified_base 8: mod_base = OTHER; note = 2'-O-methylcytidine-3'-phosphate
  modified_base 9: mod_base = OTHER; note = 2'-deoxy-2'-fluorouridine-3'-phosphate
  modified_base 10: mod_base = OTHER; note = 2'-deoxy-2'-fluoroguanosine-3'-phosphate
  modified_base 11: mod_base = OTHER; note = 2'-deoxy-2'-fluorouridine-3'-phosphate
  modified_base 12: mod_base = OTHER; note = 2'-O-methylguanosine-3'-phosphate
  modified_base 13: mod_base = OTHER; note = 2'-O-methylcytidine-3'-phosphate
  modified_base 14: mod_base = OTHER; note = 2'-O-methyluridine-3'-phosphate
  modified_base 15: mod_base = OTHER; note = 2'-O-methylcytidine-3'-phosphate
  modified_base 16: mod_base = OTHER; note = 2'-O-methyluridine-3'-phosphate
  modified_base 17: mod_base = OTHER; note = 2'-O-methyluridine-3'-phosphate
  modified_base 18: mod_base = OTHER; note = 2'-O-methylcytidine-3'-phosphate
  modified_base 19: mod_base = OTHER; note = 2'-O-methylguanosine-3'-phosphorothioate
  modified_base 20: mod_base = OTHER; note = 2'-O-methyluridine-3'-phosphorothioate
  modified_base 21: mod_base = OTHER; note = 2'-O-methyladenosine
ctgccatctgtgctcttcgta

SEQ ID NO: 804 - RNA, 21 nt, synthetic construct
  source 1..21: mol_type = other RNA
  modified_base 1: mod_base = OTHER; note = 2'-O-methyluridine-3'-phosphorothioate
  modified_base 2: mod_base = OTHER; note = 2'-O-methylguanosine-3'-phosphorothioate
  modified_base 3: mod_base = OTHER; note = 2'-O-methylcytidine-3'-phosphate
  modified_base 4: mod_base = OTHER; note = 2'-O-methylcytidine-3'-phosphate
  modified_base 5: mod_base = OTHER; note = 2'-O-methyladenosine-3'-phosphate
  modified_base 6: mod_base = OTHER; note = 2'-O-methyluridine-3'-phosphate
  modified_base 7: mod_base = OTHER; note = 2'-O-methylcytidine-3'-phosphate
  modified_base 8: mod_base = OTHER; note = 2'-O-methyluridine-3'-phosphate
  modified_base 9: mod_base = OTHER; note = 2'-deoxy-2'-fluoroguanosine-3'-phosphate
  modified_base 10: mod_base = OTHER; note = 2'-deoxy-2'-fluorouridine-3'-phosphate
  modified_base 11: mod_base = OTHER; note = 2'-deoxy-2'-fluoroguanosine-3'-phosphate
  modified_base 12: mod_base = OTHER; note = 2'-O-methylcytidine-3'-phosphate
  modified_base 13: mod_base = OTHER; note = 2'-O-methyluridine-3'-phosphate
  modified_base 14: mod_base = OTHER; note = 2'-O-methylcytidine-3'-phosphate
  modified_base 15: mod_base = OTHER; note = 2'-O-methyluridine-3'-phosphate
  modified_base 16: mod_base = OTHER; note = 2'-O-methyluridine-3'-phosphate
  modified_base 17: mod_base = OTHER; note = 2'-O-methylcytidine-3'-phosphate
  modified_base 18: mod_base = OTHER; note = 2'-O-methylguanosine-3'-phosphate
  modified_base 19: mod_base = OTHER; note = 2'-O-methyluridine-3'-phosphorothioate
  modified_base 20: mod_base = OTHER; note = 2'-O-methylcytidine-3'-phosphorothioate
  modified_base 21: mod_base = OTHER; note = 2'-O-methyladenosine
tgccatctgtgctcttcgtca

SEQ ID NO: 805 - RNA, 21 nt, synthetic construct
  source 1..21: mol_type = other RNA
  modified_base 1: mod_base = OTHER; note = 2'-O-methylguanosine-3'-phosphorothioate
  modified_base 2: mod_base = OTHER; note = 2'-O-methylcytidine-3'-phosphorothioate
  modified_base 3: mod_base = OTHER; note = 2'-O-methylcytidine-3'-phosphate
  modified_base 4: mod_base = OTHER; note = 2'-O-methyladenosine-3'-phosphate
  modified_base 5: mod_base = OTHER; note = 2'-O-methyluridine-3'-phosphate
  modified_base 6: mod_base = OTHER; note = 2'-O-methylcytidine-3'-phosphate
  modified_base 7: mod_base = OTHER; note = 2'-O-methyluridine-3'-phosphate
  modified_base 8: mod_base = OTHER; note = 2'-O-methylguanosine-3'-phosphate
  modified_base 9: mod_base = OTHER; note = 2'-deoxy-2'-fluorouridine-3'-phosphate
  modified_base 10: mod_base = OTHER; note = 2'-deoxy-2'-fluoroguanosine-3'-phosphate
  modified_base 11: mod_base = OTHER; note = 2'-deoxy-2'-fluorocytidine-3'-phosphate
  modified_base 12: mod_base = OTHER; note = 2'-O-methyluridine-3'-phosphate
  modified_base 13: mod_base = OTHER; note = 2'-O-methylcytidine-3'-phosphate
  modified_base 14: mod_base = OTHER; note = 2'-O-methyluridine-3'-phosphate
  modified_base 15: mod_base = OTHER; note = 2'-O-methyluridine-3'-phosphate
  modified_base 16: mod_base = OTHER; note = 2'-O-methylcytidine-3'-phosphate
  modified_base 17: mod_base = OTHER; note = 2'-O-methylguanosine-3'-phosphate
  modified_base 18: mod_base = OTHER; note = 2'-O-methyluridine-3'-phosphate
  modified_base 19: mod_base = OTHER; note = 2'-O-methylcytidine-3'-phosphorothioate
  modified_base 20: mod_base = OTHER; note = 2'-O-methyladenosine-3'-phosphorothioate
  modified_base 21: mod_base = OTHER; note = 2'-O-methyladenosine
gccatctgtgctcttcgtcaa

SEQ ID NO: 806 - RNA, 21 nt, synthetic construct
  source 1..21: mol_type = other RNA
  modified_base 1: mod_base = OTHER; note = 2'-O-methylcytidine-3'-phosphorothioate
  modified_base 2: mod_base = OTHER; note = 2'-O-methylcytidine-3'-phosphorothioate
  modified_base 3: mod_base = OTHER; note = 2'-O-methyladenosine-3'-phosphate
  modified_base 4: mod_base = OTHER; note = 2'-O-methyluridine-3'-phosphate
  modified_base 5: mod_base = OTHER; note = 2'-O-methylcytidine-3'-phosphate
  modified_base 6: mod_base = OTHER; note = 2'-O-methyluridine-3'-phosphate
  modified_base 7: mod_base = OTHER; note = 2'-O-methylguanosine-3'-phosphate
  modified_base 8: mod_base = OTHER; note = 2'-O-methyluridine-3'-phosphate
  modified_base 9: mod_base = OTHER; note = 2'-deoxy-2'-fluoroguanosine-3'-phosphate
  modified_base 10: mod_base = OTHER; note = 2'-deoxy-2'-fluorocytidine-3'-phosphate
  modified_base 11: mod_base = OTHER; note = 2'-deoxy-2'-fluorouridine-3'-phosphate
  modified_base 12: mod_base = OTHER; note = 2'-O-methylcytidine-3'-phosphate
  modified_base 13: mod_base = OTHER; note = 2'-O-methyluridine-3'-phosphate
  modified_base 14: mod_base = OTHER; note = 2'-O-methyluridine-3'-phosphate
  modified_base 15: mod_base = OTHER; note = 2'-O-methylcytidine-3'-phosphate
  modified_base 16: mod_base = OTHER; note = 2'-O-methylguanosine-3'-phosphate
  modified_base 17: mod_base = OTHER; note = 2'-O-methyluridine-3'-phosphate
  modified_base 18: mod_base = OTHER; note = 2'-O-methylcytidine-3'-phosphate
  modified_base 19: mod_base = OTHER; note = 2'-O-methyladenosine-3'-phosphorothioate
  modified_base 20: mod_base = OTHER; note = 2'-O-methyluridine-3'-phosphorothioate
  modified_base 21: mod_base = OTHER; note = 2'-O-methyladenosine
ccatctgtgctcttcgtcata

SEQ ID NO: 807 - RNA, 21 nt, synthetic construct
  source 1..21: mol_type = other RNA
  modified_base 1: mod_base = OTHER; note = 2'-O-methyladenosine-3'-phosphorothioate
  modified_base 2: mod_base = OTHER; note = 2'-O-methyluridine-3'-phosphorothioate
  modified_base 3: mod_base = OTHER; note = 2'-O-methylcytidine-3'-phosphate
  modified_base 4: mod_base = OTHER; note = 2'-O-methyluridine-3'-phosphate
  modified_base 5: mod_base = OTHER; note = 2'-O-methylguanosine-3'-phosphate
  modified_base 6: mod_base = OTHER; note = 2'-O-methyluridine-3'-phosphate
  modified_base 7: mod_base = OTHER; note = 2'-deoxy-2'-fluoroguanosine-3'-phosphate
  modified_base 8: mod_base = OTHER; note = 2'-O-methylcytidine-3'-phosphate
  modified_base 9: mod_base = OTHER; note = 2'-deoxy-2'-fluorouridine-3'-phosphate
  modified_base 10: mod_base = OTHER; note = 2'-deoxy-2'-fluorocytidine-3'-phosphate
  modified_base 11: mod_base = OTHER; note = 2'-deoxy-2'-fluorouridine-3'-phosphate
  modified_base 12: mod_base = OTHER; note = 2'-O-methyluridine-3'-phosphate
  modified_base 13: mod_base = OTHER; note = 2'-O-methylcytidine-3'-phosphate
  modified_base 14: mod_base = OTHER; note = 2'-O-methylguanosine-3'-phosphate
  modified_base 15: mod_base = OTHER; note = 2'-O-methyluridine-3'-phosphate
  modified_base 16: mod_base = OTHER; note = 2'-O-methylcytidine-3'-phosphate
  modified_base 17: mod_base = OTHER; note = 2'-O-methyladenosine-3'-phosphate
  modified_base 18: mod_base = OTHER; note = 2'-O-methyluridine-3'-phosphate
  modified_base 19: mod_base = OTHER; note = 2'-O-methylcytidine-3'-phosphorothioate
  modified_base 20: mod_base = OTHER; note = 2'-O-methyluridine-3'-phosphorothioate
  modified_base 21: mod_base = OTHER; note = 2'-O-methyladenosine
atctgtgctcttcgtcatcta

SEQ ID NO: 808 - RNA, 21 nt, synthetic construct
  source 1..21: mol_type = other RNA
  modified_base 1: mod_base = OTHER; note = 2'-O-methyluridine-3'-phosphorothioate
  modified_base 2: mod_base = OTHER; note = 2'-O-methylcytidine-3'-phosphorothioate
  modified_base 3: mod_base = OTHER; note = 2'-O-methyluridine-3'-phosphate
  modified_base 4: mod_base = OTHER; note = 2'-O-methylguanosine-3'-phosphate
  modified_base 5: mod_base = OTHER; note = 2'-O-methyluridine-3'-phosphate
  modified_base 6: mod_base = OTHER; note = 2'-O-methylguanosine-3'-phosphate
  modified_base 7: mod_base = OTHER; note = 2'-O-methylcytidine-3'-phosphate
  modified_base 8: mod_base = OTHER; note = 2'-O-methyluridine-3'-phosphate
  modified_base 9: mod_base = OTHER; note = 2'-deoxy-2'-fluorocytidine-3'-phosphate
  modified_base 10: mod_base = OTHER; note = 2'-deoxy-2'-fluorouridine-3'-phosphate
  modified_base 11: mod_base = OTHER; note = 2'-deoxy-2'-fluorouridine-3'-phosphate
  modified_base 12: mod_base = OTHER; note = 2'-O-methylcytidine-3'-phosphate
  modified_base 13: mod_base = OTHER; note = 2'-O-methylguanosine-3'-phosphate
  modified_base 14: mod_base = OTHER; note = 2'-O-methyluridine-3'-phosphate
  modified_base 15: mod_base = OTHER; note = 2'-O-methylcytidine-3'-phosphate
  modified_base 16: mod_base = OTHER; note = 2'-O-methyladenosine-3'-phosphate
  modified_base 17: mod_base = OTHER; note = 2'-O-methyluridine-3'-phosphate
  modified_base 18: mod_base = OTHER; note = 2'-O-methylcytidine-3'-phosphate
  modified_base 19: mod_base = OTHER; note = 2'-O-methyluridine-3'-phosphorothioate
  modified_base 20: mod_base = OTHER; note = 2'-O-methylguanosine-3'-phosphorothioate
  modified_base 21: mod_base = OTHER; note = 2'-O-methyladenosine
tctgtgctcttcgtcatctga

SEQ ID NO: 809 - RNA, 21 nt, synthetic construct
  source 1..21: mol_type = other RNA
  modified_base 1: mod_base = OTHER; note = 2'-O-methylcytidine-3'-phosphorothioate
  modified_base 2: mod_base = OTHER; note = 2'-O-methyluridine-3'-phosphorothioate
  modified_base 3: mod_base = OTHER; note = 2'-O-methylguanosine-3'-phosphate
  modified_base 4: mod_base = OTHER; note = 2'-O-methyluridine-3'-phosphate
  modified_base 5: mod_base = OTHER; note = 2'-O-methylguanosine-3'-phosphate
  modified_base 6: mod_base = OTHER; note = 2'-O-methylcytidine-3'-phosphate
  modified_base 7: mod_base = OTHER; note = 2'-deoxy-2'-fluorouridine-3'-phosphate
  modified_base 8: mod_base = OTHER; note = 2'-O-methylcytidine-3'-phosphate
  modified_base 9: mod_base = OTHER; note = 2'-deoxy-2'-fluorouridine-3'-phosphate
  modified_base 10: mod_base = OTHER; note = 2'-deoxy-2'-fluorouridine-3'-phosphate
  modified_base 11: mod_base = OTHER; note = 2'-deoxy-2'-fluorocytidine-3'-phosphate
  modified_base 12: mod_base = OTHER; note = 2'-O-methylguanosine-3'-phosphate
  modified_base 13: mod_base = OTHER; note = 2'-O-methyluridine-3'-phosphate
  modified_base 14: mod_base = OTHER; note = 2'-O-methylcytidine-3'-phosphate
  modified_base 15: mod_base = OTHER; note = 2'-O-methyladenosine-3'-phosphate
  modified_base 16: mod_base = OTHER; note = 2'-O-methyluridine-3'-phosphate
  modified_base 17: mod_base = OTHER; note = 2'-O-methylcytidine-3'-phosphate
  modified_base 18: mod_base = OTHER; note = 2'-O-methyluridine-3'-phosphate
  modified_base 19: mod_base = OTHER; note = 2'-O-methylguanosine-3'-phosphorothioate
  modified_base 20: mod_base = OTHER; note = 2'-O-methyladenosine-3'-phosphorothioate
  modified_base 21: mod_base = OTHER; note = 2'-O-methyladenosine
ctgtgctcttcgtcatctgaa

SEQ ID NO: 810 - RNA, 21 nt, synthetic construct
  source 1..21: mol_type = other RNA
  modified_base 1: mod_base = OTHER; note = 2'-O-methyluridine-3'-phosphorothioate
  modified_base 2: mod_base = OTHER; note = 2'-O-methylguanosine-3'-phosphorothioate
  modified_base 3: mod_base = OTHER; note = 2'-O-methyluridine-3'-phosphate
  modified_base 4: mod_base = OTHER; note = 2'-O-methylguanosine-3'-phosphate
  modified_base 5: mod_base = OTHER; note = 2'-O-methylcytidine-3'-phosphate
  modified_base 6: mod_base = OTHER; note = 2'-O-methyluridine-3'-phosphate
  modified_base 7: mod_base = OTHER; note = 2'-deoxy-2'-fluorocytidine-3'-phosphate
  modified_base 8: mod_base = OTHER; note = 2'-O-methyluridine-3'-phosphate
  modified_base 9: mod_base = OTHER; note = 2'-deoxy-2'-fluorouridine-3'-phosphate
  modified_base 10: mod_base = OTHER; note = 2'-deoxy-2'-fluorocytidine-3'-phosphate
  modified_base 11: mod_base = OTHER; note = 2'-deoxy-2'-fluoroguanosine-3'-phosphate
  modified_base 12: mod_base = OTHER; note = 2'-O-methyluridine-3'-phosphate
  modified_base 13: mod_base = OTHER; note = 2'-O-methylcytidine-3'-phosphate
  modified_base 14: mod_base = OTHER; note = 2'-O-methyladenosine-3'-phosphate
  modified_base 15: mod_base = OTHER; note = 2'-O-methyluridine-3'-phosphate
  modified_base 16: mod_base = OTHER; note = 2'-O-methylcytidine-3'-phosphate
  modified_base 17: mod_base = OTHER; note = 2'-O-methyluridine-3'-phosphate
  modified_base 18: mod_base = OTHER; note = 2'-O-methylguanosine-3'-phosphate
  modified_base 19: mod_base = OTHER; note = 2'-O-methyladenosine-3'-phosphorothioate
  modified_base 20: mod_base = OTHER; note = 2'-O-methylcytidine-3'-phosphorothioate
  modified_base 21: mod_base = OTHER; note = 2'-O-methyladenosine
tgtgctcttcgtcatctgaca

SEQ ID NO: 811 - RNA, 21 nt, synthetic construct
  source 1..21: mol_type = other RNA
  modified_base 1: mod_base = OTHER; note = 2'-O-methyluridine-3'-phosphorothioate
  modified_base 2: mod_base = OTHER; note = 2'-O-methylguanosine-3'-phosphorothioate
  modified_base 3: mod_base = OTHER; note = 2'-O-methylguanosine-3'-phosphate
  modified_base 4: mod_base = OTHER; note = 2'-O-methyladenosine-3'-phosphate
  modified_base 5: mod_base = OTHER; note = 2'-O-methylcytidine-3'-phosphate
  modified_base 6: mod_base = OTHER; note = 2'-O-methyluridine-3'-phosphate
  modified_base 7: mod_base = OTHER; note = 2'-deoxy-2'-fluoroadenosine-3'-phosphate
  modified_base 8: mod_base = OTHER; note = 2'-O-methylcytidine-3'-phosphate
  modified_base 9: mod_base = OTHER; note = 2'-deoxy-2'-fluorocytidine-3'-phosphate
  modified_base 10: mod_base = OTHER; note = 2'-deoxy-2'-fluoroadenosine-3'-phosphate
  modified_base 11: mod_base = OTHER; note = 2'-deoxy-2'-fluoroguanosine-3'-phosphate
  modified_base 12: mod_base = OTHER; note = 2'-O-methyluridine-3'-phosphate
  modified_base 13: mod_base = OTHER; note = 2'-O-methyluridine-3'-phosphate
  modified_base 14: mod_base = OTHER; note = 2'-O-methylguanosine-3'-phosphate
  modified_base 15: mod_base = OTHER; note = 2'-O-methyluridine-3'-phosphate
  modified_base 16: mod_base = OTHER; note = 2'-O-methylguanosine-3'-phosphate
  modified_base 17: mod_base = OTHER; note = 2'-O-methylguanosine-3'-phosphate
  modified_base 18: mod_base = OTHER; note = 2'-O-methyluridine-3'-phosphate
  modified_base 19: mod_base = OTHER; note = 2'-O-methyluridine-3'-phosphorothioate
  modified_base 20: mod_base = OTHER; note = 2'-O-methyladenosine-3'-phosphorothioate
  modified_base 21: mod_base = OTHER; note = 2'-O-methyladenosine
tggactaccagttgtggttaa

SEQ ID NO: 812 - RNA, 21 nt, synthetic construct
  source 1..21: mol_type = other RNA
  modified_base 1: mod_base = OTHER; note = 2'-O-methylguanosine-3'-phosphorothioate
  modified_base 2: mod_base = OTHER; note = 2'-O-methyladenosine-3'-phosphorothioate
  modified_base 3: mod_base = OTHER; note = 2'-O-methylcytidine-3'-phosphate
  modified_base 4: mod_base = OTHER; note = 2'-O-methyluridine-3'-phosphate
  modified_base 5: mod_base = OTHER; note = 2'-O-methyladenosine-3'-phosphate
  modified_base 6: mod_base = OTHER; note = 2'-O-methylcytidine-3'-phosphate
  modified_base 7: mod_base = OTHER; note = 2'-O-methylcytidine-3'-phosphate
  modified_base 8: mod_base = OTHER; note = 2'-O-methyladenosine-3'-phosphate
  modified_base 9: mod_base = OTHER; note = 2'-deoxy-2'-fluoroguanosine-3'-phosphate
  modified_base 10: mod_base = OTHER; note = 2'-deoxy-2'-fluorouridine-3'-phosphate
  modified_base 11: mod_base = OTHER; note = 2'-deoxy-2'-fluorouridine-3'-phosphate
  modified_base 12: mod_base = OTHER; note = 2'-O-methylguanosine-3'-phosphate
  modified_base 13: mod_base = OTHER; note = 2'-O-methyluridine-3'-phosphate
  modified_base 14: mod_base = OTHER; note = 2'-O-methylguanosine-3'-phosphate
  modified_base 15: mod_base = OTHER; note = 2'-O-methylguanosine-3'-phosphate
  modified_base 16: mod_base = OTHER; note = 2'-O-methyluridine-3'-phosphate
  modified_base 17: mod_base = OTHER; note = 2'-O-methyluridine-3'-phosphate
  modified_base 18: mod_base = OTHER; note = 2'-O-methyladenosine-3'-phosphate
  modified_base 19: mod_base = OTHER; note = 2'-O-methyladenosine-3'-phosphorothioate
  modified_base 20: mod_base = OTHER; note = 2'-O-methylguanosine-3'-phosphorothioate
  modified_base 21: mod_base = OTHER; note = 2'-O-methyladenosine
gactaccagttgtggttaaga

SEQ ID NO: 813 - RNA, 21 nt, synthetic construct
  source 1..21: mol_type = other RNA
  modified_base 1: mod_base = OTHER; note = 2'-O-methyluridine-3'-phosphorothioate
  modified_base 2: mod_base = OTHER; note = 2'-O-methylguanosine-3'-phosphorothioate
  modified_base 3: mod_base = OTHER; note = 2'-O-methyluridine-3'-phosphate
  modified_base 4: mod_base = OTHER; note = 2'-O-methylguanosine-3'-phosphate
  modified_base 5: mod_base = OTHER; note = 2'-O-methylguanosine-3'-phosphate
  modified_base 6: mod_base = OTHER; note = 2'-O-methyluridine-3'-phosphate
  modified_base 7: mod_base = OTHER; note = 2'-deoxy-2'-fluorouridine-3'-phosphate
  modified_base 8: mod_base = OTHER; note = 2'-O-methyladenosine-3'-phosphate
  modified_base 9: mod_base = OTHER; note = 2'-deoxy-2'-fluoroadenosine-3'-phosphate
  modified_base 10: mod_base = OTHER; note = 2'-deoxy-2'-fluoroguanosine-3'-phosphate
  modified_base 11: mod_base = OTHER; note = 2'-deoxy-2'-fluorocytidine-3'-phosphate
  modified_base 12: mod_base = OTHER; note = 2'-O-methyluridine-3'-phosphate
  modified_base 13: mod_base = OTHER; note = 2'-O-methylcytidine-3'-phosphate
  modified_base 14: mod_base = OTHER; note = 2'-O-methyluridine-3'-phosphate
  modified_base 15: mod_base = OTHER; note = 2'-O-methyluridine-3'-phosphate
  modified_base 16: mod_base = OTHER; note = 2'-O-methyladenosine-3'-phosphate
  modified_base 17: mod_base = OTHER; note = 2'-O-methylcytidine-3'-phosphate
  modified_base 18: mod_base = OTHER; note = 2'-O-methyladenosine-3'-phosphate
  modified_base 19: mod_base = OTHER; note = 2'-O-methylcytidine-3'-phosphorothioate
  modified_base 20: mod_base = OTHER; note = 2'-O-methylcytidine-3'-phosphorothioate
  modified_base 21: mod_base = OTHER; note = 2'-O-methyladenosine
tgtggttaagctcttacacca

SEQ ID NO: 814 - RNA, 21 nt, synthetic construct
  source 1..21: mol_type = other RNA
  modified_base 1: mod_base = OTHER; note = 2'-O-methylguanosine-3'-phosphorothioate
  modified_base 2: mod_base = OTHER; note = 2'-O-methyladenosine-3'-phosphorothioate
  modified_base 3: mod_base = OTHER; note = 2'-O-methyluridine-3'-phosphate
  modified_base 4: mod_base = OTHER; note = 2'-O-methyladenosine-3'-phosphate
  modified_base 5: mod_base = OTHER; note = 2'-O-methyladenosine-3'-phosphate
  modified_base 6: mod_base = OTHER; note = 2'-O-methyladenosine-3'-phosphate
  modified_base 7: mod_base = OTHER; note = 2'-O-methylguanosine-3'-phosphate
  modified_base 8: mod_base = OTHER; note = 2'-O-methylguanosine-3'-phosphate
  modified_base 9: mod_base = OTHER; note = 2'-deoxy-2'-fluorocytidine-3'-phosphate
  modified_base 10: mod_base = OTHER; note = 2'-deoxy-2'-fluorouridine-3'-phosphate
  modified_base 11: mod_base = OTHER; note = 2'-deoxy-2'-fluoroadenosine-3'-phosphate
  modified_base 12: mod_base = OTHER; note = 2'-O-methylcytidine-3'-phosphate
  modified_base 13: mod_base = OTHER; note = 2'-O-methyluridine-3'-phosphate
  modified_base 14: mod_base = OTHER; note = 2'-O-methylguanosine-3'-phosphate
  modified_base 15: mod_base = OTHER; note = 2'-O-methyluridine-3'-phosphate
  modified_base 16: mod_base = OTHER; note = 2'-O-methyluridine-3'-phosphate
  modified_base 17: mod_base = OTHER; note = 2'-O-methylguanosine-3'-phosphate
  modified_base 18: mod_base = OTHER; note = 2'-O-methylguanosine-3'-phosphate
  modified_base 19: mod_base = OTHER; note = 2'-O-methyladenosine-3'-phosphorothioate
  modified_base 20: mod_base = OTHER; note = 2'-O-methyluridine-3'-phosphorothioate
  modified_base 21: mod_base = OTHER; note = 2'-O-methyladenosine
gataaaggctactgttggata

SEQ ID NO: 815 - RNA, 21 nt, synthetic construct
  source 1..21: mol_type = other RNA
  modified_base 1: mod_base = OTHER; note = 2'-O-methyladenosine-3'-phosphorothioate
  modified_base 2: mod_base = OTHER; note = 2'-O-methyluridine-3'-phosphorothioate
  modified_base 3: mod_base = OTHER; note = 2'-O-methyladenosine-3'-phosphate
  modified_base 4: mod_base = OTHER; note = 2'-O-methyladenosine-3'-phosphate
  modified_base 5: mod_base = OTHER; note = 2'-O-methyladenosine-3'-phosphate
  modified_base 6: mod_base = OTHER; note = 2'-O-methylguanosine-3'-phosphate
  modified_base 7: mod_base = OTHER; note = 2'-deoxy-2'-fluoroguanosine-3'-phosphate
  modified_base 8: mod_base = OTHER; note = 2'-O-methylcytidine-3'-phosphate
  modified_base 9: mod_base = OTHER; note = 2'-deoxy-2'-fluorouridine-3'-phosphate
  modified_base 10: mod_base = OTHER; note = 2'-deoxy-2'-fluoroadenosine-3'-phosphate
  modified_base 11: mod_base = OTHER; note = 2'-deoxy-2'-fluorocytidine-3'-phosphate
  modified_base 12: mod_base = OTHER; note = 2'-O-methyluridine-3'-phosphate
  modified_base 13: mod_base = OTHER; note = 2'-O-methylguanosine-3'-phosphate
  modified_base 14: mod_base = OTHER; note = 2'-O-methyluridine-3'-phosphate
  modified_base 15: mod_base = OTHER; note = 2'-O-methyluridine-3'-phosphate
  modified_base 16: mod_base = OTHER; note = 2'-O-methylguanosine-3'-phosphate
  modified_base 17: mod_base = OTHER; note = 2'-O-methylguanosine-3'-phosphate
  modified_base 18: mod_base = OTHER; note = 2'-O-methyladenosine-3'-phosphate
  modified_base 19: mod_base = OTHER; note = 2'-O-methyluridine-3'-phosphorothioate
  modified_base 20: mod_base = OTHER; note = 2'-O-methyluridine-3'-phosphorothioate
  modified_base 21: mod_base = OTHER; note = 2'-O-methyladenosine
ataaaggctactgttggatta

SEQ ID NO: 816 - RNA, 21 nt, synthetic construct
  source 1..21: mol_type = other RNA
  modified_base 1: mod_base = OTHER; note = 2'-O-methyladenosine-3'-phosphorothioate
  modified_base 2: mod_base = OTHER; note = 2'-O-methyluridine-3'-phosphorothioate
  modified_base 3: mod_base = OTHER; note = 2'-O-methyladenosine-3'-phosphate
  modified_base 4: mod_base = OTHER; note = 2'-O-methyladenosine-3'-phosphate
  modified_base 5: mod_base = OTHER; note = 2'-O-methyladenosine-3'-phosphate
  modified_base 6: mod_base = OTHER; note = 2'-O-methylguanosine-3'-phosphate
  modified_base 7: mod_base = OTHER; note = 2'-O-methylguanosine-3'-phosphate
  modified_base 8: mod_base = OTHER; note = 2'-O-methylcytidine-3'-phosphate
  modified_base 9: mod_base = OTHER; note = 2'-deoxy-2'-fluorouridine-3'-phosphate
  modified_base 10: mod_base = OTHER; note = 2'-deoxy-2'-fluoroadenosine-3'-phosphate
  modified_base 11: mod_base = OTHER; note = 2'-deoxy-2'-fluorocytidine-3'-phosphate
  modified_base 12: mod_base = OTHER; note = 2'-O-methyluridine-3'-phosphate
  modified_base 13: mod_base = OTHER; note = 2'-O-methylguanosine-3'-phosphate
  modified_base 14: mod_base = OTHER; note = 2'-O-methyluridine-3'-phosphate
  modified_base 15: mod_base = OTHER; note = 2'-O-methyluridine-3'-phosphate
  modified_base 16: mod_base = OTHER; note = 2'-O-methylguanosine-3'-phosphate
  modified_base 17: mod_base = OTHER; note = 2'-O-methylguanosine-3'-phosphate
  modified_base 18: mod_base = OTHER; note = 2'-O-methyladenosine-3'-phosphate
  modified_base 19: mod_base = OTHER; note = 2'-O-methyluridine-3'-phosphorothioate
  modified_base 20: mod_base = OTHER; note = 2'-O-methyluridine-3'-phosphorothioate
  modified_base 21: mod_base = OTHER; note = 2'-O-methyladenosine
ataaaggctactgttggatta

SEQ ID NO: 817 - RNA, 21 nt, synthetic construct
  source 1..21: mol_type = other RNA
  modified_base 1: mod_base = OTHER; note = 2'-O-methyladenosine-3'-phosphorothioate
  modified_base 2: mod_base = OTHER; note = 2'-O-methyladenosine-3'-phosphorothioate
  modified_base 3: mod_base = OTHER; note = 2'-O-methylguanosine-3'-phosphate
  modified_base 4: mod_base = OTHER; note = 2'-O-methylguanosine-3'-phosphate
  modified_base 5: mod_base = OTHER; note = 2'-O-methylcytidine-3'-phosphate
  modified_base 6: mod_base = OTHER; note = 2'-O-methyluridine-3'-phosphate
  modified_base 7: mod_base = OTHER; note = 2'-deoxy-2'-fluoroadenosine-3'-phosphate
  modified_base 8: mod_base = OTHER; note = 2'-O-methylcytidine-3'-phosphate
  modified_base 9: mod_base = OTHER; note = 2'-deoxy-2'-fluorouridine-3'-phosphate
  modified_base 10: mod_base = OTHER; note = 2'-deoxy-2'-fluoroguanosine-3'-phosphate
  modified_base 11: mod_base = OTHER; note = 2'-deoxy-2'-fluorouridine-3'-phosphate
  modified_base 12: mod_base = OTHER; note = 2'-O-methyluridine-3'-phosphate
  modified_base 13: mod_base = OTHER; note = 2'-O-methylguanosine-3'-phosphate
  modified_base 14: mod_base = OTHER; note = 2'-O-methylguanosine-3'-phosphate
  modified_base 15: mod_base = OTHER; note = 2'-O-methyladenosine-3'-phosphate
  modified_base 16: mod_base = OTHER; note = 2'-O-methyluridine-3'-phosphate
  modified_base 17: mod_base = OTHER; note = 2'-O-methyluridine-3'-phosphate
  modified_base 18: mod_base = OTHER; note = 2'-O-methylguanosine-3'-phosphate
  modified_base 19: mod_base = OTHER; note = 2'-O-methyladenosine-3'-phosphorothioate
  modified_base 20: mod_base = OTHER; note = 2'-O-methyluridine-3'-phosphorothioate
  modified_base 21: mod_base = OTHER; note = 2'-O-methyladenosine
aaggctactgttggattgata

SEQ ID NO: 818 - RNA, 21 nt, synthetic construct
  source 1..21: mol_type = other RNA
  modified_base 1: mod_base = OTHER; note = 2'-O-methyladenosine-3'-phosphorothioate
  modified_base 2: mod_base = OTHER; note = 2'-O-methyladenosine-3'-phosphorothioate
  modified_base 3: mod_base = OTHER; note = 2'-O-methylguanosine-3'-phosphate
  modified_base 4: mod_base = OTHER; note = 2'-O-methylguanosine-3'-phosphate
  modified_base 5: mod_base = OTHER; note = 2'-O-methylcytidine-3'-phosphate
  modified_base 6: mod_base = OTHER; note = 2'-O-methyluridine-3'-phosphate
  modified_base 7: mod_base = OTHER; note = 2'-O-methyladenosine-3'-phosphate
  modified_base 8: mod_base = OTHER; note = 2'-O-methylcytidine-3'-phosphate
  modified_base 9: mod_base = OTHER; note = 2'-deoxy-2'-fluorouridine-3'-phosphate
  modified_base 10: mod_base = OTHER; note = 2'-deoxy-2'-fluoroguanosine-3'-phosphate
  modified_base 11: mod_base = OTHER; note = 2'-deoxy-2'-fluorouridine-3'-phosphate
  modified_base 12: mod_base = OTHER; note = 2'-O-methyluridine-3'-phosphate
  modified_base 13: mod_base = OTHER; note = 2'-O-methylguanosine-3'-phosphate
  modified_base 14: mod_base = OTHER; note = 2'-O-methylguanosine-3'-phosphate
  modified_base 15: mod_base = OTHER; note = 2'-O-methyladenosine-3'-phosphate
  modified_base 16: mod_base = OTHER; note = 2'-O-methyluridine-3'-phosphate
  modified_base 17: mod_base = OTHER; note = 2'-O-methyluridine-3'-phosphate
  modified_base 18: mod_base = OTHER; note = 2'-O-methylguanosine-3'-phosphate
  modified_base 19: mod_base = OTHER; note = 2'-O-methyladenosine-3'-phosphorothioate
  modified_base 20: mod_base = OTHER; note = 2'-O-methyluridine-3'-phosphorothioate
  modified_base 21: mod_base = OTHER; note = 2'-O-methyladenosine
aaggctactgttggattgata

SEQ ID NO: 819 - RNA, 21 nt, synthetic construct
  source 1..21: mol_type = other RNA
  modified_base 1: mod_base = OTHER; note = 2'-O-methyladenosine-3'-phosphorothioate
  modified_base 2: mod_base = OTHER; note = 2'-O-methylguanosine-3'-phosphorothioate
  modified_base 3: mod_base = OTHER; note = 2'-O-methylguanosine-3'-phosphate
  modified_base 4: mod_base = OTHER; note = 2'-O-methylcytidine-3'-phosphate
  modified_base 5: mod_base = OTHER; note = 2'-O-methyluridine-3'-phosphate
  modified_base 6: mod_base = OTHER; note = 2'-O-methyladenosine-3'-phosphate
  modified_base 7: mod_base = OTHER; note = 2'-O-methylcytidine-3'-phosphate
  modified_base 8: mod_base = OTHER; note = 2'-O-methyluridine-3'-phosphate
  modified_base 9: mod_base = OTHER; note = 2'-deoxy-2'-fluoroguanosine-3'-phosphate
  modified_base 10: mod_base = OTHER; note = 2'-deoxy-2'-fluorouridine-3'-phosphate
  modified_base 11: mod_base = OTHER; note = 2'-deoxy-2'-fluorouridine-3'-phosphate
  modified_base 12: mod_base = OTHER; note = 2'-O-methylguanosine-3'-phosphate
  modified_base 13: mod_base = OTHER; note = 2'-O-methylguanosine-3'-phosphate
  modified_base 14: mod_base = OTHER; note = 2'-O-methyladenosine-3'-phosphate
  modified_base 15: mod_base = OTHER; note = 2'-O-methyluridine-3'-phosphate
  modified_base 16: mod_base = OTHER; note = 2'-O-methyluridine-3'-phosphate
  modified_base 17: mod_base = OTHER; note = 2'-O-methylguanosine-3'-phosphate
  modified_base 18: mod_base = OTHER; note = 2'-O-methyladenosine-3'-phosphate
  modified_base 19: mod_base = OTHER; note = 2'-O-methyluridine-3'-phosphorothioate
  modified_base 20: mod_base = OTHER; note = 2'-O-methyluridine-3'-phosphorothioate
  modified_base 21: mod_base = OTHER; note = 2'-O-methyladenosine
aggctactgttggattgatta

SEQ ID NO: 820 - RNA, 21 nt, synthetic construct
  source 1..21: mol_type = other RNA
  modified_base 1: mod_base = OTHER; note = 2'-O-methylguanosine-3'-phosphorothioate
  modified_base 2: mod_base = OTHER; note = 2'-O-methylguanosine-3'-phosphorothioate
  modified_base 3: mod_base = OTHER; note = 2'-O-methylcytidine-3'-phosphate
  modified_base 4: mod_base = OTHER; note = 2'-O-methyluridine-3'-phosphate
  modified_base 5: mod_base = OTHER; note = 2'-O-methyladenosine-3'-phosphate
  modified_base 6: mod_base = OTHER; note = 2'-O-methylcytidine-3'-phosphate
  modified_base 7: mod_base = OTHER; note = 2'-deoxy-2'-fluorouridine-3'-phosphate
  modified_base 8: mod_base = OTHER; note = 2'-O-methylguanosine-3'-phosphate
  modified_base 9: mod_base = OTHER; note = 2'-deoxy-2'-fluorouridine-3'-phosphate
  modified_base 10: mod_base = OTHER; note = 2'-deoxy-2'-fluorouridine-3'-phosphate
  modified_base 11: mod_base = OTHER; note = 2'-deoxy-2'-fluoroguanosine-3'-phosphate
  modified_base 12: mod_base = OTHER; note = 2'-O-methylguanosine-3'-phosphate
  modified_base 13: mod_base = OTHER; note = 2'-O-methyladenosine-3'-phosphate
  modified_base 14: mod_base = OTHER; note = 2'-O-methyluridine-3'-phosphate
  modified_base 15: mod_base = OTHER; note = 2'-O-methyluridine-3'-phosphate
  modified_base 16: mod_base = OTHER; note = 2'-O-methylguanosine-3'-phosphate
  modified_base 17: mod_base = OTHER; note = 2'-O-methyladenosine-3'-phosphate
  modified_base 18: mod_base = OTHER; note = 2'-O-methyluridine-3'-phosphate
  modified_base 19: mod_base = OTHER; note = 2'-O-methyluridine-3'-phosphorothioate
  modified_base 20: mod_base = OTHER; note = 2'-O-methylcytidine-3'-phosphorothioate
  modified_base 21: mod_base = OTHER; note = 2'-O-methyladenosine
ggctactgttggattgattca

SEQ ID NO: 821 - RNA, 21 nt, synthetic construct
  source 1..21: mol_type = other RNA
  modified_base 1: mod_base = OTHER; note = 2'-O-methylguanosine-3'-phosphorothioate
  modified_base 2: mod_base = OTHER; note = 2'-O-methylcytidine-3'-phosphorothioate
  modified_base 3: mod_base = OTHER; note = 2'-O-methyluridine-3'-phosphate
  modified_base 4: mod_base = OTHER; note = 2'-O-methyladenosine-3'-phosphate
  modified_base 5: mod_base = OTHER; note = 2'-O-methylcytidine-3'-phosphate
  modified_base 6: mod_base = OTHER; note = 2'-O-methyluridine-3'-phosphate
  modified_base 7: mod_base = OTHER; note = 2'-O-methylguanosine-3'-phosphate
  modified_base 8: mod_base = OTHER; note = 2'-O-methyluridine-3'-phosphate
  modified_base 9: mod_base = OTHER; note = 2'-deoxy-2'-fluorouridine-3'-phosphate
  modified_base 10: mod_base = OTHER; note = 2'-deoxy-2'-fluoroguanosine-3'-phosphate
  modified_base 11: mod_base = OTHER; note = 2'-deoxy-2'-fluoroguanosine-3'-phosphate
  modified_base 12: mod_base = OTHER; note = 2'-O-methyladenosine-3'-phosphate
  modified_base 13: mod_base = OTHER; note = 2'-O-methyluridine-3'-phosphate
  modified_base 14: mod_base = OTHER; note = 2'-O-methyluridine-3'-phosphate
  modified_base 15: mod_base = OTHER; note = 2'-O-methylguanosine-3'-phosphate
  modified_base 16: mod_base = OTHER; note = 2'-O-methyladenosine-3'-phosphate
  modified_base 17: mod_base = OTHER; note = 2'-O-methyluridine-3'-phosphate
  modified_base 18: mod_base = OTHER; note = 2'-O-methyluridine-3'-phosphate
  modified_base 19: mod_base = OTHER; note = 2'-O-methylcytidine-3'-phosphorothioate
  modified_base 20: mod_base = OTHER; note = 2'-O-methylguanosine-3'-phosphorothioate
  modified_base 21: mod_base = OTHER; note = 2'-O-methyladenosine
gctactgttggattgattcga

SEQ ID NO: 822 - RNA, 21 nt, synthetic construct
  source 1..21: mol_type = other RNA
  modified_base 1: mod_base = OTHER; note = 2'-O-methylcytidine-3'-phosphorothioate
  modified_base 2: mod_base = OTHER; note = 2'-O-methyluridine-3'-phosphorothioate
  modified_base 3: mod_base = OTHER; note = 2'-O-methyladenosine-3'-phosphate
  modified_base 4: mod_base = OTHER; note = 2'-O-methylcytidine-3'-phosphate
  modified_base 5: mod_base = OTHER; note = 2'-O-methyluridine-3'-phosphate
  modified_base 6: mod_base = OTHER; note = 2'-O-methylguanosine-3'-phosphate
  modified_base 7: mod_base = OTHER; note = 2'-O-methyluridine-3'-phosphate
  modified_base 8: mod_base = OTHER; note = 2'-O-methyluridine-3'-phosphate
  modified_base 9: mod_base = OTHER; note = 2'-deoxy-2'-fluoroguanosine-3'-phosphate
  modified_base 10: mod_base = OTHER; note = 2'-deoxy-2'-fluoroguanosine-3'-phosphate
  modified_base 11: mod_base = OTHER; note = 2'-deoxy-2'-fluoroadenosine-3'-phosphate
  modified_base 12: mod_base = OTHER; note = 2'-O-methyluridine-3'-phosphate
  modified_base 13: mod_base = OTHER; note = 2'-O-methyluridine-3'-phosphate
  modified_base 14: mod_base = OTHER; note = 2'-O-methylguanosine-3'-phosphate
  modified_base 15: mod_base = OTHER; note = 2'-O-methyladenosine-3'-phosphate
  modified_base 16: mod_base = OTHER; note = 2'-O-methyluridine-3'-phosphate
  modified_base 17: mod_base = OTHER; note = 2'-O-methyluridine-3'-phosphate
  modified_base 18: mod_base = OTHER; note = 2'-O-methylcytidine-3'-phosphate
  modified_base 19: mod_base = OTHER; note = 2'-O-methylguanosine-3'-phosphorothioate
  modified_base 20: mod_base = OTHER; note = 2'-O-methyladenosine-3'-phosphorothioate
  modified_base 21: mod_base = OTHER; note = 2'-O-methyladenosine
ctactgttggattgattcgaa

SEQ ID NO: 823 - RNA, 21 nt, synthetic construct
  source 1..21: mol_type = other RNA
  modified_base 1: mod_base = OTHER; note = 2'-O-methyluridine-3'-phosphorothioate
  modified_base 2: mod_base = OTHER; note = 2'-O-methyladenosine-3'-phosphorothioate
  modified_base 3: mod_base = OTHER; note = 2'-O-methylcytidine-3'-phosphate
  modified_base 4: mod_base = OTHER; note = 2'-O-methyluridine-3'-phosphate
  modified_base 5: mod_base = OTHER; note = 2'-O-methylguanosine-3'-phosphate
  modified_base 6: mod_base = OTHER; note = 2'-O-methyluridine-3'-phosphate
  modified_base 7: mod_base = OTHER; note = 2'-O-methyluridine-3'-phosphate
  modified_base 8: mod_base = OTHER; note = 2'-O-methylguanosine-3'-phosphate
  modified_base 9: mod_base = OTHER; note = 2'-deoxy-2'-fluoroguanosine-3'-phosphate
  modified_base 10: mod_base = OTHER; note = 2'-deoxy-2'-fluoroadenosine-3'-phosphate
  modified_base 11: mod_base = OTHER; note = 2'-deoxy-2'-fluorouridine-3'-phosphate
  modified_base 12: mod_base = OTHER; note = 2'-O-methyluridine-3'-phosphate
  modified_base 13: mod_base = OTHER; note = 2'-O-methylguanosine-3'-phosphate
  modified_base 14: mod_base = OTHER; note = 2'-O-methyladenosine-3'-phosphate
  modified_base 15: mod_base = OTHER; note = 2'-O-methyluridine-3'-phosphate
  modified_base 16: mod_base = OTHER; note = 2'-O-methyluridine-3'-phosphate
  modified_base 17: mod_base = OTHER; note = 2'-O-methylcytidine-3'-phosphate
  modified_base 18: mod_base = OTHER; note = 2'-O-methylguanosine-3'-phosphate
  modified_base 19: mod_base = OTHER; note = 2'-O-methyladenosine-3'-phosphorothioate
  modified_base 20: mod_base = OTHER; note = 2'-O-methyladenosine-3'-phosphorothioate
  modified_base 21: mod_base = OTHER; note = 2'-O-methyladenosine
tactgttggattgattcgaaa

SEQ ID NO: 824 - RNA, 21 nt, synthetic construct
  source 1..21: mol_type = other RNA
  modified_base 1: mod_base = OTHER; note = 2'-O-methyladenosine-3'-phosphorothioate
  modified_base 2: mod_base = OTHER; note = 2'-O-methylcytidine-3'-phosphorothioate
  modified_base 3: mod_base = OTHER; note = 2'-O-methyluridine-3'-phosphate
  modified_base 4: mod_base = OTHER; note = 2'-O-methylguanosine-3'-phosphate
  modified_base 5: mod_base = OTHER; note = 2'-O-methyluridine-3'-phosphate
  modified_base 6: mod_base = OTHER; note = 2'-O-methyluridine-3'-phosphate
  modified_base 7: mod_base = OTHER; note = 2'-O-methylguanosine-3'-phosphate
  modified_base 8: mod_base = OTHER; note = 2'-O-methylguanosine-3'-phosphate
  modified_base 9: mod_base = OTHER; note = 2'-deoxy-2'-fluoroadenosine-3'-phosphate
  modified_base 10: mod_base = OTHER; note = 2'-deoxy-2'-fluorouridine-3'-phosphate
  modified_base 11: mod_base = OTHER; note = 2'-deoxy-2'-fluorouridine-3'-phosphate
  modified_base 12: mod_base = OTHER; note = 2'-O-methylguanosine-3'-phosphate
  modified_base 13: mod_base = OTHER; note = 2'-O-methyladenosine-3'-phosphate
  modified_base 14: mod_base = OTHER; note = 2'-O-methyluridine-3'-phosphate
  modified_base 15: mod_base = OTHER; note = 2'-O-methyluridine-3'-phosphate
  modified_base 16: mod_base = OTHER; note = 2'-O-methylcytidine-3'-phosphate
  modified_base 17: mod_base = OTHER; note = 2'-O-methylguanosine-3'-phosphate
  modified_base 18: mod_base = OTHER; note = 2'-O-methyladenosine-3'-phosphate
  modified_base 19: mod_base = OTHER; note = 2'-O-methyladenosine-3'-phosphorothioate
  modified_base 20: mod_base = OTHER; note = 2'-O-methyladenosine-3'-phosphorothioate
  modified_base 21: mod_base = OTHER; note = 2'-O-methyladenosine
actgttggattgattcgaaaa

SEQ ID NO: 825 - RNA, 21 nt, synthetic construct
  source 1..21: mol_type = other RNA
  modified_base 1: mod_base = OTHER; note = 2'-O-methylcytidine-3'-phosphorothioate
  modified_base 2: mod_base = OTHER; note = 2'-O-methyluridine-3'-phosphorothioate
  modified_base 3: mod_base = OTHER; note = 2'-O-methylguanosine-3'-phosphate
  modified_base 4: mod_base = OTHER; note = 2'-O-methyluridine-3'-phosphate
  modified_base 5: mod_base = OTHER; note = 2'-O-methyluridine-3'-phosphate
  modified_base 6: mod_base = OTHER; note = 2'-O-methylguanosine-3'-phosphate
  modified_base 7: mod_base = OTHER; note = 2'-O-methylguanosine-3'-phosphate
  modified_base 8: mod_base = OTHER; note = 2'-O-methyladenosine-3'-phosphate
  modified_base 9: mod_base = OTHER; note = 2'-deoxy-2'-fluorouridine-3'-phosphate
  modified_base 10: mod_base = OTHER; note = 2'-deoxy-2'-fluorouridine-3'-phosphate
  modified_base 11: mod_base = OTHER; note = 2'-deoxy-2'-fluoroguanosine-3'-phosphate
  modified_base 12: mod_base = OTHER; note = 2'-O-methyladenosine-3'-phosphate
  modified_base 13: mod_base = OTHER; note = 2'-O-methyluridine-3'-phosphate
  modified_base 14: mod_base = OTHER; note = 2'-O-methyluridine-3'-phosphate
  modified_base 15: mod_base = OTHER; note = 2'-O-methylcytidine-3'-phosphate
  modified_base 16: mod_base = OTHER; note = 2'-O-methylguanosine-3'-phosphate
  modified_base 17: mod_base = OTHER; note = 2'-O-methyladenosine-3'-phosphate
  modified_base 18: mod_base = OTHER; note = 2'-O-methyladenosine-3'-phosphate
  modified_base 19: mod_base = OTHER; note = 2'-O-methyladenosine-3'-phosphorothioate
  modified_base 20: mod_base = OTHER; note = 2'-O-methyluridine-3'-phosphorothioate
  modified_base 21: mod_base = OTHER; note = 2'-O-methyladenosine
ctgttggattgattcgaaata

SEQ ID NO: 826 - RNA, 21 nt, synthetic construct
  source 1..21: mol_type = other RNA
  modified_base 1: mod_base = OTHER; note = 2'-O-methylguanosine-3'-phosphorothioate
  modified_base 2: mod_base = OTHER; note = 2'-O-methyluridine-3'-phosphorothioate
  modified_base 3: mod_base = OTHER; note = 2'-O-methyluridine-3'-phosphate
  modified_base 4: mod_base = OTHER; note = 2'-O-methylguanosine-3'-phosphate
  modified_base 5: mod_base = OTHER; note = 2'-O-methylguanosine-3'-phosphate
  modified_base 6: mod_base = OTHER; note = 2'-O-methyladenosine-3'-phosphate
  modified_base 7: mod_base = OTHER; note = 2'-O-methyluridine-3'-phosphate
  modified_base 8: mod_base = OTHER; note = 2'-O-methyluridine-3'-phosphate
  modified_base 9: mod_base = OTHER; note = 2'-deoxy-2'-fluoroguanosine-3'-phosphate
  modified_base 10: mod_base = OTHER; note = 2'-deoxy-2'-fluoroadenosine-3'-phosphate
  modified_base 11: mod_base = OTHER; note = 2'-deoxy-2'-fluorouridine-3'-phosphate
  modified_base 12: mod_base = OTHER; note = 2'-O-methyluridine-3'-phosphate
  modified_base 13: mod_base = OTHER; note = 2'-O-methylcytidine-3'-phosphate
  modified_base 14: mod_base = OTHER; note = 2'-O-methylguanosine-3'-phosphate
  modified_base 15: mod_base = OTHER; note = 2'-O-methyladenosine-3'-phosphate
  modified_base 16: mod_base = OTHER; note = 2'-O-methyladenosine-3'-phosphate
  modified_base 17: mod_base = OTHER; note = 2'-O-methyladenosine-3'-phosphate
  modified_base 18: mod_base = OTHER; note = 2'-O-methyluridine-3'-phosphate
  modified_base 19: mod_base = OTHER; note = 2'-O-methylcytidine-3'-phosphorothioate
  modified_base 20: mod_base = OTHER; note = 2'-O-methyluridine-3'-phosphorothioate
  modified_base 21: mod_base = OTHER; note = 2'-O-methyladenosine
gttggattgattcgaaatcta

SEQ ID NO: 827 - RNA, 21 nt, synthetic construct
  source 1..21: mol_type = other RNA
  modified_base 1: mod_base = OTHER; note = 2'-O-methylguanosine-3'-phosphorothioate
  modified_base 2: mod_base = OTHER; note = 2'-O-methyluridine-3'-phosphorothioate
  modified_base 3: mod_base = OTHER; note = 2'-O-methyluridine-3'-phosphate
  modified_base 4: mod_base = OTHER; note = 2'-O-methylguanosine-3'-phosphate
  modified_base 5: mod_base = OTHER; note = 2'-O-methylguanosine-3'-phosphate
  modified_base 6: mod_base = OTHER; note = 2'-O-methyladenosine-3'-phosphate
  modified_base 7: mod_base = OTHER; note = 2'-deoxy-2'-fluorouridine-3'-phosphate
  modified_base 8: mod_base = OTHER; note = 2'-O-methyluridine-3'-phosphate
  modified_base 9: mod_base = OTHER; note = 2'-deoxy-2'-fluoroguanosine-3'-phosphate
  modified_base 10: mod_base = OTHER; note = 2'-deoxy-2'-fluoroadenosine-3'-phosphate
  modified_base 11: mod_base = OTHER; note = 2'-deoxy-2'-fluorouridine-3'-phosphate
  modified_base 12: mod_base = OTHER; note = 2'-O-methyluridine-3'-phosphate
  modified_base 13: mod_base = OTHER; note = 2'-O-methylcytidine-3'-phosphate
  modified_base 14: mod_base = OTHER; note = 2'-O-methylguanosine-3'-phosphate
  modified_base 15: mod_base = OTHER; note = 2'-O-methyladenosine-3'-phosphate
  modified_base 16: mod_base = OTHER; note = 2'-O-methyladenosine-3'-phosphate
  modified_base 17: mod_base = OTHER; note = 2'-O-methyladenosine-3'-phosphate
  modified_base 18: mod_base = OTHER; note = 2'-O-methyluridine-3'-phosphate
  modified_base 19: mod_base = OTHER; note = 2'-O-methylcytidine-3'-phosphorothioate
  modified_base 20: mod_base = OTHER; note = 2'-O-methyluridine-3'-phosphorothioate
  modified_base 21: mod_base = OTHER; note = 2'-O-methyladenosine
gttggattgattcgaaatcta

SEQ ID NO: 828 - RNA, 21 nt, synthetic construct
  source 1..21: mol_type = other RNA
  modified_base 1: mod_base = OTHER; note = 2'-O-methyluridine-3'-phosphorothioate
  modified_base 2: mod_base = OTHER; note = 2'-O-methyluridine-3'-phosphorothioate
  modified_base 3: mod_base = OTHER; note = 2'-O-methylguanosine-3'-phosphate
  modified_base 4: mod_base = OTHER; note = 2'-O-methylguanosine-3'-phosphate
  modified_base 5: mod_base = OTHER; note = 2'-O-methyladenosine-3'-phosphate
  modified_base 6: mod_base = OTHER; note = 2'-O-methyluridine-3'-phosphate
  modified_base 7: mod_base = OTHER; note = 2'-O-methyluridine-3'-phosphate
  modified_base 8: mod_base = OTHER; note = 2'-O-methylguanosine-3'-phosphate
  modified_base 9: mod_base = OTHER; note = 2'-deoxy-2'-fluoroadenosine-3'-phosphate
  modified_base 10: mod_base = OTHER; note = 2'-deoxy-2'-fluorouridine-3'-phosphate
  modified_base 11: mod_base = OTHER; note = 2'-deoxy-2'-fluorouridine-3'-phosphate
  modified_base 12: mod_base = OTHER; note = 2'-O-methylcytidine-3'-phosphate
  modified_base 13: mod_base = OTHER; note = 2'-O-methylguanosine-3'-phosphate
  modified_base 14: mod_base = OTHER; note = 2'-O-methyladenosine-3'-phosphate
  modified_base 15: mod_base = OTHER; note = 2'-O-methyladenosine-3'-phosphate
  modified_base 16: mod_base = OTHER; note = 2'-O-methyladenosine-3'-phosphate
  modified_base 17: mod_base = OTHER; note = 2'-O-methyluridine-3'-phosphate
  modified_base 18: mod_base = OTHER; note = 2'-O-methylcytidine-3'-phosphate
  modified_base 19: mod_base = OTHER; note = 2'-O-methyluridine-3'-phosphorothioate
  modified_base 20: mod_base = OTHER; note = 2'-O-methyluridine-3'-phosphorothioate
  modified_base 21: mod_base = OTHER; note = 2'-O-methyladenosine
ttggattgattcgaaatctta

SEQ ID NO: 829 - RNA, 21 nt, synthetic construct
  source 1..21: mol_type = other RNA
  modified_base 1: mod_base = OTHER; note = 2'-O-methylguanosine-3'-phosphorothioate
  modified_base 2: mod_base = OTHER; note = 2'-O-methylguanosine-3'-phosphorothioate
  modified_base 3: mod_base = OTHER; note = 2'-O-methyladenosine-3'-phosphate
  modified_base 4: mod_base = OTHER; note = 2'-O-methyluridine-3'-phosphate
  modified_base 5: mod_base = OTHER; note = 2'-O-methyluridine-3'-phosphate
  modified_base 6: mod_base = OTHER; note = 2'-O-methylguanosine-3'-phosphate
  modified_base 7: mod_base = OTHER; note = 2'-deoxy-2'-fluoroadenosine-3'-phosphate
  modified_base 8: mod_base = OTHER; note = 2'-O-methyluridine-3'-phosphate
  modified_base 9: mod_base = OTHER; note = 2'-deoxy-2'-fluorouridine-3'-phosphate
  modified_base 10: mod_base = OTHER; note = 2'-deoxy-2'-fluorocytidine-3'-phosphate
  modified_base 11: mod_base = OTHER; note = 2'-deoxy-2'-fluoroguanosine-3'-phosphate
  modified_base 12: mod_base = OTHER; note = 2'-O-methyladenosine-3'-phosphate
  modified_base 13: mod_base = OTHER; note = 2'-O-methyladenosine-3'-phosphate
  modified_base 14: mod_base = OTHER; note = 2'-O-methyladenosine-3'-phosphate
  modified_base 15: mod_base = OTHER; note = 2'-O-methyluridine-3'-phosphate
  modified_base 16: mod_base = OTHER; note = 2'-O-methylcytidine-3'-phosphate
  modified_base 17: mod_base = OTHER; note = 2'-O-methyluridine-3'-phosphate
  modified_base 18: mod_base = OTHER; note = 2'-O-methyluridine-3'-phosphate
  modified_base 19: mod_base = OTHER; note = 2'-O-methylguanosine-3'-phosphorothioate
  modified_base 20: mod_base = OTHER; note = 2'-O-methylcytidine-3'-phosphorothioate
  modified_base 21: mod_base = OTHER; note = 2'-O-methyladenosine
ggattgattcgaaatcttgca

SEQ ID NO: 830 - RNA, 21 nt, synthetic construct
  source 1..21: mol_type = other RNA
  modified_base 1: mod_base = OTHER; note = 2'-O-methylguanosine-3'-phosphorothioate
  modified_base 2: mod_base = OTHER; note = 2'-O-methylguanosine-3'-phosphorothioate
  modified_base 3: mod_base = OTHER; note = 2'-O-methyladenosine-3'-phosphate
  modified_base 4: mod_base = OTHER; note = 2'-O-methyluridine-3'-phosphate
  modified_base 5: mod_base = OTHER; note = 2'-O-methyluridine-3'-phosphate
  modified_base 6: mod_base = OTHER; note = 2'-O-methylguanosine-3'-phosphate
  modified_base 7: mod_base = OTHER; note = 2'-O-methyladenosine-3'-phosphate
  modified_base 8: mod_base = OTHER; note = 2'-O-methyluridine-3'-phosphate
  modified_base 9: mod_base = OTHER; note = 2'-deoxy-2'-fluorouridine-3'-phosphate
  modified_base 10: mod_base = OTHER; note = 2'-deoxy-2'-fluorocytidine-3'-phosphate
  modified_base 11: mod_base = OTHER; note = 2'-deoxy-2'-fluoroguanosine-3'-phosphate
  modified_base 12: mod_base = OTHER; note = 2'-O-methyladenosine-3'-phosphate
  modified_base 13: mod_base = OTHER; note = 2'-O-methyladenosine-3'-phosphate
  modified_base 14: mod_base = OTHER; note = 2'-O-methyladenosine-3'-phosphate
  modified_base 15: mod_base = OTHER; note = 2'-O-methyluridine-3'-phosphate
  modified_base 16: mod_base = OTHER; note = 2'-O-methylcytidine-3'-phosphate
  modified_base 17: mod_base = OTHER; note = 2'-O-methyluridine-3'-phosphate
  modified_base 18: mod_base = OTHER; note = 2'-O-methyluridine-3'-phosphate
  modified_base 19: mod_base = OTHER; note = 2'-O-methylguanosine-3'-phosphorothioate
  modified_base 20: mod_base = OTHER; note = 2'-O-methylcytidine-3'-phosphorothioate
  modified_base 21: mod_base = OTHER; note = 2'-O-methyladenosine
ggattgattcgaaatcttgca

SEQ ID NO: 831 - RNA, 21 nt, synthetic construct
  source 1..21: mol_type = other RNA
  modified_base 1: mod_base = OTHER; note = 2'-O-methyluridine-3'-phosphorothioate
  modified_base 2: mod_base = OTHER; note = 2'-O-methyluridine-3'-phosphorothioate
  modified_base 3: mod_base = OTHER; note = 2'-O-methylguanosine-3'-phosphate
  modified_base 4: mod_base = OTHER; note = 2'-O-methyladenosine-3'-phosphate
  modified_base 5: mod_base = OTHER; note = 2'-O-methyluridine-3'-phosphate
  modified_base 6: mod_base = OTHER; note = 2'-O-methyluridine-3'-phosphate
  modified_base 7: mod_base = OTHER; note = 2'-deoxy-2'-fluorocytidine-3'-phosphate
  modified_base 8: mod_base = OTHER; note = 2'-O-methylguanosine-3'-phosphate
  modified_base 9: mod_base = OTHER; note = 2'-deoxy-2'-fluoroadenosine-3'-phosphate
  modified_base 10: mod_base = OTHER; note = 2'-deoxy-2'-fluoroadenosine-3'-phosphate
  modified_base 11: mod_base = OTHER; note = 2'-deoxy-2'-fluoroadenosine-3'-phosphate
  modified_base 12: mod_base = OTHER; note = 2'-O-methyluridine-3'-phosphate
  modified_base 13: mod_base = OTHER; note = 2'-O-methylcytidine-3'-phosphate
  modified_base 14: mod_base = OTHER; note = 2'-O-methyluridine-3'-phosphate
  modified_base 15: mod_base = OTHER; note = 2'-O-methyluridine-3'-phosphate
  modified_base 16: mod_base = OTHER; note = 2'-O-methylguanosine-3'-phosphate
  modified_base 17: mod_base = OTHER; note = 2'-O-methylcytidine-3'-phosphate
  modified_base 18: mod_base = OTHER; note = 2'-O-methylcytidine-3'-phosphate
  modified_base 19: mod_base = OTHER; note = 2'-O-methylcytidine-3'-phosphorothioate
  modified_base 20: mod_base = OTHER; note = 2'-O-methyluridine-3'-phosphorothioate
  modified_base 21: mod_base = OTHER; note = 2'-O-methyladenosine
ttgattcgaaatcttgcccta

SEQ ID NO: 832 - RNA, 21 nt, synthetic construct
  source 1..21: mol_type = other RNA
  modified_base 1: mod_base = OTHER; note = 2'-O-methyladenosine-3'-phosphorothioate
  modified_base 2: mod_base = OTHER; note = 2'-O-methyluridine-3'-phosphorothioate
  modified_base 3: mod_base = OTHER; note = 2'-O-methyluridine-3'-phosphate
  modified_base 4: mod_base = OTHER; note = 2'-O-methylcytidine-3'-phosphate
  modified_base 5: mod_base = OTHER; note = 2'-O-methylcytidine-3'-phosphate
  modified_base 6: mod_base = OTHER; note = 2'-O-methyladenosine-3'-phosphate
  modified_base 7: mod_base = OTHER; note = 2'-deoxy-2'-fluorocytidine-3'-phosphate
  modified_base 8: mod_base = OTHER; note = 2'-O-methylguanosine-3'-phosphate
  modified_base 9: mod_base = OTHER; note = 2'-deoxy-2'-fluoroadenosine-3'-phosphate
  modified_base 10: mod_base = OTHER; note = 2'-deoxy-2'-fluorocytidine-3'-phosphate
  modified_base 11: mod_base = OTHER; note = 2'-deoxy-2'-fluorouridine-3'-phosphate
  modified_base 12: mod_base = OTHER; note = 2'-O-methyladenosine-3'-phosphate
  modified_base 13: mod_base = OTHER; note = 2'-O-methylguanosine-3'-phosphate
  modified_base 14: mod_base = OTHER; note = 2'-O-methyluridine-3'-phosphate
  modified_base 15: mod_base = OTHER; note = 2'-O-methyluridine-3'-phosphate
  modified_base 16: mod_base = OTHER; note = 2'-O-methylcytidine-3'-phosphate
  modified_base 17: mod_base = OTHER; note = 2'-O-methyladenosine-3'-phosphate
  modified_base 18: mod_base = OTHER; note = 2'-O-methylguanosine-3'-phosphate
  modified_base 19: mod_base = OTHER; note = 2'-O-methyluridine-3'-phosphorothioate
  modified_base 20: mod_base = OTHER; note = 2'-O-methyluridine-3'-phosphorothioate
  modified_base 21: mod_base = OTHER; note = 2'-O-methyladenosine
attccacgactagttcagtta

SEQ ID NO: 833 - RNA, 21 nt, synthetic construct
  source 1..21: mol_type = other RNA
  modified_base 1: mod_base = OTHER; note = 2'-O-methylcytidine-3'-phosphorothioate
  modified_base 2: mod_base = OTHER; note = 2'-O-methylcytidine-3'-phosphorothioate
  modified_base 3: mod_base = OTHER; note = 2'-O-methyladenosine-3'-phosphate
  modified_base 4: mod_base = OTHER; note = 2'-O-methylcytidine-3'-phosphate
  modified_base 5: mod_base = OTHER; note = 2'-O-methylguanosine-3'-phosphate
  modified_base 6: mod_base = OTHER; note = 2'-O-methyladenosine-3'-phosphate
  modified_base 7: mod_base = OTHER; note = 2'-O-methylcytidine-3'-phosphate
  modified_base 8: mod_base = OTHER; note = 2'-O-methyluridine-3'-phosphate
  modified_base 9: mod_base = OTHER; note = 2'-deoxy-2'-fluoroadenosine-3'-phosphate
  modified_base 10: mod_base = OTHER; note = 2'-deoxy-2'-fluoroguanosine-3'-phosphate
  modified_base 11: mod_base = OTHER; note = 2'-deoxy-2'-fluorouridine-3'-phosphate
  modified_base 12: mod_base = OTHER; note = 2'-O-methyluridine-3'-phosphate
  modified_base 13: mod_base = OTHER; note = 2'-O-methylcytidine-3'-phosphate
  modified_base 14: mod_base = OTHER; note = 2'-O-methyladenosine-3'-phosphate
  modified_base 15: mod_base = OTHER; note = 2'-O-methylguanosine-3'-phosphate
  modified_base 16: mod_base = OTHER; note = 2'-O-methyluridine-3'-phosphate
  modified_base 17: mod_base = OTHER; note = 2'-O-methyluridine-3'-phosphate
  modified_base 18: mod_base = OTHER; note = 2'-O-methylguanosine-3'-phosphate
  modified_base 19: mod_base = OTHER; note = 2'-O-methylcytidine-3'-phosphorothioate
  modified_base 20: mod_base = OTHER; note = 2'-O-methyluridine-3'-phosphorothioate
  modified_base 21: mod_base = OTHER; note = 2'-O-methyladenosine
ccacgactagttcagttgcta

SEQ ID NO: 834 - RNA, 21 nt, synthetic construct
  source 1..21: mol_type = other RNA
  modified_base 1: mod_base = OTHER; note = 2'-O-methyluridine-3'-phosphorothioate
  modified_base 2: mod_base = OTHER; note = 2'-O-methyluridine-3'-phosphorothioate
  modified_base 3: mod_base = OTHER; note = 2'-O-methylcytidine-3'-phosphate
  modified_base 4: mod_base = OTHER; note = 2'-O-methyladenosine-3'-phosphate
  modified_base 5: mod_base = OTHER; note = 2'-O-methylguanosine-3'-phosphate
  modified_base 6: mod_base = OTHER; note = 2'-O-methyluridine-3'-phosphate
  modified_base 7: mod_base = OTHER; note = 2'-O-methyluridine-3'-phosphate
  modified_base 8: mod_base = OTHER; note = 2'-O-methylguanosine-3'-phosphate
  modified_base 9: mod_base = OTHER; note = 2'-deoxy-2'-fluorocytidine-3'-phosphate
  modified_base 10: mod_base = OTHER; note = 2'-deoxy-2'-fluorouridine-3'-phosphate
  modified_base 11: mod_base = OTHER; note = 2'-deoxy-2'-fluorouridine-3'-phosphate
  modified_base 12: mod_base = OTHER; note = 2'-O-methylguanosine-3'-phosphate
  modified_base 13: mod_base = OTHER; note = 2'-O-methyluridine-3'-phosphate
  modified_base 14: mod_base = OTHER; note = 2'-O-methyluridine-3'-phosphate
  modified_base 15: mod_base = OTHER; note = 2'-O-methylcytidine-3'-phosphate
  modified_base 16: mod_base = OTHER; note = 2'-O-methylguanosine-3'-phosphate
  modified_base 17: mod_base = OTHER; note = 2'-O-methyluridine-3'-phosphate
  modified_base 18: mod_base = OTHER; note = 2'-O-methylguanosine-3'-phosphate
  modified_base 19: mod_base = OTHER; note = 2'-O-methylcytidine-3'-phosphorothioate
  modified_base 20: mod_base = OTHER; note = 2'-O-methyladenosine-3'-phosphorothioate
  modified_base 21: mod_base = OTHER; note = 2'-O-methyladenosine
ttcagttgcttgttcgtgcaa

SEQ ID NO: 835 - RNA, 21 nt, synthetic construct
  source 1..21: mol_type = other RNA
  modified_base 1: mod_base = OTHER; note = 2'-O-methylguanosine-3'-phosphorothioate
  modified_base 2: mod_base = OTHER; note = 2'-O-methylguanosine-3'-phosphorothioate
  modified_base 3: mod_base = OTHER; note = 2'-O-methyladenosine-3'-phosphate
  modified_base 4: mod_base = OTHER; note = 2'-O-methylcytidine-3'-phosphate
  modified_base 5: mod_base = OTHER; note = 2'-O-methyladenosine-3'-phosphate
  modified_base 6: mod_base = OTHER; note = 2'-O-methylcytidine-3'-phosphate
  modified_base 7: mod_base = OTHER; note = 2'-O-methyladenosine-3'-phosphate
  modified_base 8: mod_base = OTHER; note = 2'-O-methylguanosine-3'-phosphate
  modified_base 9: mod_base = OTHER; note = 2'-deoxy-2'-fluorocytidine-3'-phosphate
  modified_base 10: mod_base = OTHER; note = 2'-deoxy-2'-fluoroadenosine-3'-phosphate
  modified_base 11: mod_base = OTHER; note = 2'-deoxy-2'-fluoroguanosine-3'-phosphate
  modified_base 12: mod_base = OTHER; note = 2'-O-methylcytidine-3'-phosphate
  modified_base 13: mod_base = OTHER; note = 2'-O-methyladenosine-3'-phosphate
  modified_base 14: mod_base = OTHER; note = 2'-O-methyladenosine-3'-phosphate
  modified_base 15: mod_base = OTHER; note = 2'-O-methyluridine-3'-phosphate
  modified_base 16: mod_base = OTHER; note = 2'-O-methyluridine-3'-phosphate
  modified_base 17: mod_base = OTHER; note = 2'-O-methyluridine-3'-phosphate
  modified_base 18: mod_base = OTHER; note = 2'-O-methylguanosine-3'-phosphate
  modified_base 19: mod_base = OTHER; note = 2'-O-methyluridine-3'-phosphorothioate
  modified_base 20: mod_base = OTHER; note = 2'-O-methylguanosine-3'-phosphorothioate
  modified_base 21: mod_base = OTHER; note = 2'-O-methyladenosine
ggacacagcagcaatttgtga

SEQ ID NO: 836 - RNA, 21 nt, synthetic construct
  source 1..21: mol_type = other RNA
  modified_base 1: mod_base = OTHER; note = 2'-O-methyladenosine-3'-phosphorothioate
  modified_base 2: mod_base = OTHER; note = 2'-O-methyluridine-3'-phosphorothioate
  modified_base 3: mod_base = OTHER; note = 2'-O-methylcytidine-3'-phosphate
  modified_base 4: mod_base = OTHER; note = 2'-O-methylcytidine-3'-phosphate
  modified_base 5: mod_base = OTHER; note = 2'-O-methyluridine-3'-phosphate
  modified_base 6: mod_base = OTHER; note = 2'-O-methyladenosine-3'-phosphate
  modified_base 7: mod_base = OTHER; note = 2'-deoxy-2'-fluoroguanosine-3'-phosphate
  modified_base 8: mod_base = OTHER; note = 2'-O-methylcytidine-3'-phosphate
  modified_base 9: mod_base = OTHER; note = 2'-deoxy-2'-fluorouridine-3'-phosphate
  modified_base 10: mod_base = OTHER; note = 2'-deoxy-2'-fluorocytidine-3'-phosphate
  modified_base 11: mod_base = OTHER; note = 2'-deoxy-2'-fluoroguanosine-3'-phosphate
  modified_base 12: mod_base = OTHER; note = 2'-O-methylguanosine-3'-phosphate
  modified_base 13: mod_base = OTHER; note = 2'-O-methylguanosine-3'-phosphate
  modified_base 14: mod_base = OTHER; note = 2'-O-methyladenosine-3'-phosphate
  modified_base 15: mod_base = OTHER; note = 2'-O-methyluridine-3'-phosphate
  modified_base 16: mod_base = OTHER; note = 2'-O-methylguanosine-3'-phosphate
  modified_base 17: mod_base = OTHER; note = 2'-O-methyluridine-3'-phosphate
  modified_base 18: mod_base = OTHER; note = 2'-O-methyluridine-3'-phosphate
  modified_base 19: mod_base = OTHER; note = 2'-O-methylcytidine-3'-phosphorothioate
  modified_base 20: mod_base = OTHER; note = 2'-O-methyladenosine-3'-phosphorothioate
  modified_base 21: mod_base = OTHER; note = 2'-O-methyladenosine
atcctagctcgggatgttcaa

SEQ ID NO: 837 - RNA, 21 nt, synthetic construct
  source 1..21: mol_type = other RNA
  modified_base 1: mod_base = OTHER; note = 2'-O-methyladenosine-3'-phosphorothioate
  modified_base 2: mod_base = OTHER; note = 2'-O-methylguanosine-3'-phosphorothioate
  modified_base 3: mod_base = OTHER; note = 2'-O-methylcytidine-3'-phosphate
  modified_base 4: mod_base = OTHER; note = 2'-O-methyluridine-3'-phosphate
  modified_base 5: mod_base = OTHER; note = 2'-O-methylcytidine-3'-phosphate
  modified_base 6: mod_base = OTHER; note = 2'-O-methylguanosine-3'-phosphate
  modified_base 7: mod_base = OTHER; note = 2'-deoxy-2'-fluoroguanosine-3'-phosphate
  modified_base 8: mod_base = OTHER; note = 2'-O-methylguanosine-3'-phosphate
  modified_base 9: mod_base = OTHER; note = 2'-deoxy-2'-fluoroadenosine-3'-phosphate
  modified_base 10: mod_base = OTHER; note = 2'-deoxy-2'-fluorouridine-3'-phosphate
  modified_base 11: mod_base = OTHER; note = 2'-deoxy-2'-fluoroguanosine-3'-phosphate
  modified_base 12: mod_base = OTHER; note = 2'-O-methyluridine-3'-phosphate
  modified_base 13: mod_base = OTHER; note = 2'-O-methyluridine-3'-phosphate
  modified_base 14: mod_base = OTHER; note = 2'-O-methylcytidine-3'-phosphate
  modified_base 15: mod_base = OTHER; note = 2'-O-methyladenosine-3'-phosphate
  modified_base 16: mod_base = OTHER; note = 2'-O-methylcytidine-3'-phosphate
  modified_base 17: mod_base = OTHER; note = 2'-O-methyladenosine-3'-phosphate
  modified_base 18: mod_base = OTHER; note = 2'-O-methyladenosine-3'-phosphate
  modified_base 19: mod_base = OTHER; note = 2'-O-methylcytidine-3'-phosphorothioate
  modified_base 20: mod_base = OTHER; note = 2'-O-methylcytidine-3'-phosphorothioate
  modified_base 21: mod_base = OTHER; note = 2'-O-methyladenosine
agctcgggatgttcacaacca

SEQ ID NO: 838 - RNA, 21 nt, synthetic construct
  source 1..21: mol_type = other RNA
  modified_base 1: mod_base = OTHER; note = 2'-O-methylguanosine-3'-phosphorothioate
  modified_base 2: mod_base = OTHER; note = 2'-O-methyladenosine-3'-phosphorothioate
  modified_base 3: mod_base = OTHER; note = 2'-O-methyluridine-3'-phosphate
  modified_base 4: mod_base = OTHER; note = 2'-O-methylguanosine-3'-phosphate
  modified_base 5: mod_base = OTHER; note = 2'-O-methyluridine-3'-phosphate
  modified_base 6: mod_base = OTHER; note = 2'-O-methyluridine-3'-phosphate
  modified_base 7: mod_base = OTHER; note = 2'-O-methylcytidine-3'-phosphate
  modified_base 8: mod_base = OTHER; note = 2'-O-methyladenosine-3'-phosphate
  modified_base 9: mod_base = OTHER; note = 2'-deoxy-2'-fluorocytidine-3'-phosphate
  modified_base 10: mod_base = OTHER; note = 2'-deoxy-2'-fluoroadenosine-3'-phosphate
  modified_base 11: mod_base = OTHER; note = 2'-deoxy-2'-fluoroadenosine-3'-phosphate
  modified_base 12: mod_base = OTHER; note = 2'-O-methylcytidine-3'-phosphate
  modified_base 13: mod_base = OTHER; note = 2'-O-methylcytidine-3'-phosphate
  modified_base 14: mod_base = OTHER; note = 2'-O-methylguanosine-3'-phosphate
  modified_base 15: mod_base = OTHER; note = 2'-O-methyladenosine-3'-phosphate
  modified_base 16: mod_base = OTHER; note = 2'-O-methyladenosine-3'-phosphate
  modified_base 17: mod_base = OTHER; note = 2'-O-methyluridine-3'-phosphate
  modified_base 18: mod_base = OTHER; note = 2'-O-methyluridine-3'-phosphate
  modified_base 19: mod_base = OTHER; note = 2'-O-methylguanosine-3'-phosphorothioate
  modified_base 20: mod_base = OTHER; note = 2'-O-methyluridine-3'-phosphorothioate
  modified_base 21: mod_base = OTHER; note = 2'-O-methyladenosine
gatgttcacaaccgaattgta

SEQ ID NO: 839 - RNA, 21 nt, synthetic construct
  source 1..21: mol_type = other RNA
  modified_base 1: mod_base = OTHER; note = 2'-O-methyluridine-3'-phosphorothioate
  modified_base 2: mod_base = OTHER; note = 2'-O-methyladenosine-3'-phosphorothioate
  modified_base 3: mod_base = OTHER; note = 2'-O-methyluridine-3'-phosphate
  modified_base 4: mod_base = OTHER; note = 2'-O-methylcytidine-3'-phosphate
  modified_base 5: mod_base = OTHER; note = 2'-O-methyladenosine-3'-phosphate
  modified_base 6: mod_base = OTHER; note = 2'-O-methylguanosine-3'-phosphate
  modified_base 7: mod_base = OTHER; note = 2'-deoxy-2'-fluoroadenosine-3'-phosphate
  modified_base 8: mod_base = OTHER; note = 2'-O-methylguanosine-3'-phosphate
  modified_base 9: mod_base = OTHER; note = 2'-deoxy-2'-fluoroguanosine-3'-phosphate
  modified_base 10: mod_base = OTHER; note = 2'-deoxy-2'-fluoroadenosine-3'-phosphate
  modified_base 11: mod_base = OTHER; note = 2'-deoxy-2'-fluorocytidine-3'-phosphate
  modified_base 12: mod_base = OTHER; note = 2'-O-methyluridine-3'-phosphate
  modified_base 13: mod_base = OTHER; note = 2'-O-methyladenosine-3'-phosphate
  modified_base 14: mod_base = OTHER; note = 2'-O-methyladenosine-3'-phosphate
  modified_base 15: mod_base = OTHER; note = 2'-O-methyladenosine-3'-phosphate
  modified_base 16: mod_base = OTHER; note = 2'-O-methyluridine-3'-phosphate
  modified_base 17: mod_base = OTHER; note = 2'-O-methyladenosine-3'-phosphate
  modified_base 18: mod_base = OTHER; note = 2'-O-methylcytidine-3'-phosphate
  modified_base 19: mod_base = OTHER; note = 2'-O-methylcytidine-3'-phosphorothioate
  modified_base 20: mod_base = OTHER; note = 2'-O-methyladenosine-3'-phosphorothioate
  modified_base 21: mod_base = OTHER; note = 2'-O-methyladenosine
tatcagaggactaaataccaa

SEQ ID NO: 840 - RNA, 21 nt, synthetic construct
  source 1..21: mol_type = other RNA
  modified_base 1: mod_base = OTHER; note = 2'-O-methyladenosine-3'-phosphorothioate
  modified_base 2: mod_base = OTHER; note = 2'-O-methyluridine-3'-phosphorothioate
  modified_base 3: mod_base = OTHER; note = 2'-O-methylcytidine-3'-phosphate
  modified_base 4: mod_base = OTHER; note = 2'-O-methyladenosine-3'-phosphate
  modified_base 5: mod_base = OTHER; note = 2'-O-methylguanosine-3'-phosphate
  modified_base 6: mod_base = OTHER; note = 2'-O-methyladenosine-3'-phosphate
  modified_base 7: mod_base = OTHER; note = 2'-deoxy-2'-fluoroguanosine-3'-phosphate
  modified_base 8: mod_base = OTHER; note = 2'-O-methylguanosine-3'-phosphate
  modified_base 9: mod_base = OTHER; note = 2'-deoxy-2'-fluoroadenosine-3'-phosphate
  modified_base 10: mod_base = OTHER; note = 2'-deoxy-2'-fluorocytidine-3'-phosphate
  modified_base 11: mod_base = OTHER; note = 2'-deoxy-2'-fluorouridine-3'-phosphate
  modified_base 12: mod_base = OTHER; note = 2'-O-methyladenosine-3'-phosphate
  modified_base 13: mod_base = OTHER; note = 2'-O-methyladenosine-3'-phosphate
  modified_base 14: mod_base = OTHER; note = 2'-O-methyladenosine-3'-phosphate
  modified_base 15: mod_base = OTHER; note = 2'-O-methyluridine-3'-phosphate
  modified_base 16: mod_base = OTHER; note = 2'-O-methyladenosine-3'-phosphate
  modified_base 17: mod_base = OTHER; note = 2'-O-methylcytidine-3'-phosphate
  modified_base 18: mod_base = OTHER; note = 2'-O-methylcytidine-3'-phosphate
  modified_base 19: mod_base = OTHER; note = 2'-O-methyladenosine-3'-phosphorothioate
  modified_base 20: mod_base = OTHER; note = 2'-O-methyluridine-3'-phosphorothioate
  modified_base 21: mod_base = OTHER; note = 2'-O-methyladenosine
atcagaggactaaataccata

SEQ ID NO: 841 - RNA, 21 nt, synthetic construct
  source 1..21: mol_type = other RNA
  modified_base 1: mod_base = OTHER; note = 2'-O-methyluridine-3'-phosphorothioate
  modified_base 2: mod_base = OTHER; note = 2'-O-methylcytidine-3'-phosphorothioate
  modified_base 3: mod_base = OTHER; note = 2'-O-methyladenosine-3'-phosphate
  modified_base 4: mod_base = OTHER; note = 2'-O-methylguanosine-3'-phosphate
  modified_base 5: mod_base = OTHER; note = 2'-O-methyladenosine-3'-phosphate
  modified_base 6: mod_base = OTHER; note = 2'-O-methylguanosine-3'-phosphate
  modified_base 7: mod_base = OTHER; note = 2'-deoxy-2'-fluoroguanosine-3'-phosphate
  modified_base 8: mod_base = OTHER; note = 2'-O-methyladenosine-3'-phosphate
  modified_base 9: mod_base = OTHER; note = 2'-deoxy-2'-fluorocytidine-3'-phosphate
  modified_base 10: mod_base = OTHER; note = 2'-deoxy-2'-fluorouridine-3'-phosphate
  modified_base 11: mod_base = OTHER; note = 2'-deoxy-2'-fluoroadenosine-3'-phosphate
  modified_base 12: mod_base = OTHER; note = 2'-O-methyladenosine-3'-phosphate
  modified_base 13: mod_base = OTHER; note = 2'-O-methyladenosine-3'-phosphate
  modified_base 14: mod_base = OTHER; note = 2'-O-methyluridine-3'-phosphate
  modified_base 15: mod_base = OTHER; note = 2'-O-methyladenosine-3'-phosphate
  modified_base 16: mod_base = OTHER; note = 2'-O-methylcytidine-3'-phosphate
  modified_base 17: mod_base = OTHER; note = 2'-O-methylcytidine-3'-phosphate
  modified_base 18: mod_base = OTHER; note = 2'-O-methyladenosine-3'-phosphate
  modified_base 19: mod_base = OTHER; note = 2'-O-methyluridine-3'-phosphorothioate
  modified_base 20: mod_base = OTHER; note = 2'-O-methyluridine-3'-phosphorothioate
  modified_base 21: mod_base = OTHER; note = 2'-O-methyladenosine
tcagaggactaaataccatta

SEQ ID NO: 842 - RNA, 21 nt, synthetic construct
  source 1..21: mol_type = other RNA
  modified_base 1: mod_base = OTHER; note = 2'-O-methylguanosine-3'-phosphorothioate
  modified_base 2: mod_base = OTHER; note = 2'-O-methyladenosine-3'-phosphorothioate
  modified_base 3: mod_base = OTHER; note = 2'-O-methylguanosine-3'-phosphate
  modified_base 4: mod_base = OTHER; note = 2'-O-methylguanosine-3'-phosphate
  modified_base 5: mod_base = OTHER; note = 2'-O-methyladenosine-3'-phosphate
  modified_base 6: mod_base = OTHER; note = 2'-O-methylcytidine-3'-phosphate
  modified_base 7: mod_base = OTHER; note = 2'-deoxy-2'-fluorouridine-3'-phosphate
  modified_base 8: mod_base = OTHER; note = 2'-O-methyladenosine-3'-phosphate
  modified_base 9: mod_base = OTHER; note = 2'-deoxy-2'-fluoroadenosine-3'-phosphate
  modified_base 10: mod_base = OTHER; note = 2'-deoxy-2'-fluoroadenosine-3'-phosphate
  modified_base 11: mod_base = OTHER; note = 2'-deoxy-2'-fluorouridine-3'-phosphate
  modified_base 12: mod_base = OTHER; note = 2'-O-methyladenosine-3'-phosphate
  modified_base 13: mod_base = OTHER; note = 2'-O-methylcytidine-3'-phosphate
  modified_base 14: mod_base = OTHER; note = 2'-O-methylcytidine-3'-phosphate
  modified_base 15: mod_base = OTHER; note = 2'-O-methyladenosine-3'-phosphate
  modified_base 16: mod_base = OTHER; note = 2'-O-methyluridine-3'-phosphate
  modified_base 17: mod_base = OTHER; note = 2'-O-methyluridine-3'-phosphate
  modified_base 18: mod_base = OTHER; note = 2'-O-methylcytidine-3'-phosphate
  modified_base 19: mod_base = OTHER; note = 2'-O-methylcytidine-3'-phosphorothioate
  modified_base 20: mod_base = OTHER; note = 2'-O-methyladenosine-3'-phosphorothioate
  modified_base 21: mod_base = OTHER; note = 2'-O-methyladenosine
gaggactaaataccattccaa

SEQ ID NO: 843 - RNA, 21 nt, synthetic construct
  source 1..21: mol_type = other RNA
  modified_base 1: mod_base = OTHER; note = 2'-O-methylguanosine-3'-phosphorothioate
  modified_base 2: mod_base = OTHER; note = 2'-O-methyladenosine-3'-phosphorothioate
  modified_base 3: mod_base = OTHER; note = 2'-O-methylguanosine-3'-phosphate
  modified_base 4: mod_base = OTHER; note = 2'-O-methylguanosine-3'-phosphate
  modified_base 5: mod_base = OTHER; note = 2'-O-methyladenosine-3'-phosphate
  modified_base 6: mod_base = OTHER; note = 2'-O-methylcytidine-3'-phosphate
  modified_base 7: mod_base = OTHER; note = 2'-O-methyluridine-3'-phosphate
  modified_base 8: mod_base = OTHER; note = 2'-O-methyladenosine-3'-phosphate
  modified_base 9: mod_base = OTHER; note = 2'-deoxy-2'-fluoroadenosine-3'-phosphate
  modified_base 10: mod_base = OTHER; note = 2'-deoxy-2'-fluoroadenosine-3'-phosphate
  modified_base 11: mod_base = OTHER; note = 2'-deoxy-2'-fluorouridine-3'-phosphate
  modified_base 12: mod_base = OTHER; note = 2'-O-methyladenosine-3'-phosphate
  modified_base 13: mod_base = OTHER; note = 2'-O-methylcytidine-3'-phosphate
  modified_base 14: mod_base = OTHER; note = 2'-O-methylcytidine-3'-phosphate
  modified_base 15: mod_base = OTHER; note = 2'-O-methyladenosine-3'-phosphate
  modified_base 16: mod_base = OTHER; note = 2'-O-methyluridine-3'-phosphate
  modified_base 17: mod_base = OTHER; note = 2'-O-methyluridine-3'-phosphate
  modified_base 18: mod_base = OTHER; note = 2'-O-methylcytidine-3'-phosphate
  modified_base 19: mod_base = OTHER; note = 2'-O-methylcytidine-3'-phosphorothioate
  modified_base 20: mod_base = OTHER; note = 2'-O-methyladenosine-3'-phosphorothioate
  modified_base 21: mod_base = OTHER; note = 2'-O-methyladenosine
gaggactaaataccattccaa

SEQ ID NO: 844 - RNA, 21 nt, synthetic construct
  source 1..21: mol_type = other RNA
  modified_base 1: mod_base = OTHER; note = 2'-O-methylguanosine-3'-phosphorothioate
  modified_base 2: mod_base = OTHER; note = 2'-O-methylguanosine-3'-phosphorothioate
  modified_base 3: mod_base = OTHER; note = 2'-O-methyladenosine-3'-phosphate
  modified_base 4: mod_base = OTHER; note = 2'-O-methylcytidine-3'-phosphate
  modified_base 5: mod_base = OTHER; note = 2'-O-methyluridine-3'-phosphate
  modified_base 6: mod_base = OTHER; note = 2'-O-methyladenosine-3'-phosphate
  modified_base 7: mod_base = OTHER; note = 2'-O-methyladenosine-3'-phosphate
  modified_base 8: mod_base = OTHER; note = 2'-O-methyladenosine-3'-phosphate
  modified_base 9: mod_base = OTHER; note = 2'-deoxy-2'-fluorouridine-3'-phosphate
  modified_base 10: mod_base = OTHER; note = 2'-deoxy-2'-fluoroadenosine-3'-phosphate
  modified_base 11: mod_base = OTHER; note = 2'-deoxy-2'-fluorocytidine-3'-phosphate
  modified_base 12: mod_base = OTHER; note = 2'-O-methylcytidine-3'-phosphate
  modified_base 13: mod_base = OTHER; note = 2'-O-methyladenosine-3'-phosphate
  modified_base 14: mod_base = OTHER; note = 2'-O-methyluridine-3'-phosphate
  modified_base 15: mod_base = OTHER; note = 2'-O-methyluridine-3'-phosphate
  modified_base 16: mod_base = OTHER; note = 2'-O-methylcytidine-3'-phosphate
  modified_base 17: mod_base = OTHER; note = 2'-O-methylcytidine-3'-phosphate
  modified_base 18: mod_base = OTHER; note = 2'-O-methyladenosine-3'-phosphate
  modified_base 19: mod_base = OTHER; note = 2'-O-methyluridine-3'-phosphorothioate
  modified_base 20: mod_base = OTHER; note = 2'-O-methyluridine-3'-phosphorothioate
  modified_base 21: mod_base = OTHER; note = 2'-O-methyladenosine
ggactaaataccattccatta

SEQ ID NO: 845 - RNA, 21 nt, synthetic construct
  source 1..21: mol_type = other RNA
  modified_base 1: mod_base = OTHER; note = 2'-O-methyladenosine-3'-phosphorothioate
  modified_base 2: mod_base = OTHER; note = 2'-O-methylcytidine-3'-phosphorothioate
  modified_base 3: mod_base = OTHER; note = 2'-O-methyluridine-3'-phosphate
  modified_base 4: mod_base = OTHER; note = 2'-O-methyladenosine-3'-phosphate
  modified_base 5: mod_base = OTHER; note = 2'-O-methyladenosine-3'-phosphate
  modified_base 6: mod_base = OTHER; note = 2'-O-methyladenosine-3'-phosphate
  modified_base 7: mod_base = OTHER; note = 2'-O-methyluridine-3'-phosphate
  modified_base 8: mod_base = OTHER; note = 2'-O-methyladenosine-3'-phosphate
  modified_base 9: mod_base = OTHER; note = 2'-deoxy-2'-fluorocytidine-3'-phosphate
  modified_base 10: mod_base = OTHER; note = 2'-deoxy-2'-fluorocytidine-3'-phosphate
  modified_base 11: mod_base = OTHER; note = 2'-deoxy-2'-fluoroadenosine-3'-phosphate
  modified_base 12: mod_base = OTHER; note = 2'-O-methyluridine-3'-phosphate
  modified_base 13: mod_base = OTHER; note = 2'-O-methyluridine-3'-phosphate
  modified_base 14: mod_base = OTHER; note = 2'-O-methylcytidine-3'-phosphate
  modified_base 15: mod_base = OTHER; note = 2'-O-methylcytidine-3'-phosphate
  modified_base 16: mod_base = OTHER; note = 2'-O-methyladenosine-3'-phosphate
  modified_base 17: mod_base = OTHER; note = 2'-O-methyluridine-3'-phosphate
  modified_base 18: mod_base = OTHER; note = 2'-O-methyluridine-3'-phosphate
  modified_base 19: mod_base = OTHER; note = 2'-O-methylguanosine-3'-phosphorothioate
  modified_base 20: mod_base = OTHER; note = 2'-O-methyluridine-3'-phosphorothioate
  modified_base 21: mod_base = OTHER; note = 2'-O-methyladenosine
actaaataccattccattgta

SEQ ID NO: 846 - RNA, 21 nt, synthetic construct
  source 1..21: mol_type = other RNA
  modified_base 1: mod_base = OTHER; note = 2'-O-methylcytidine-3'-phosphorothioate
  modified_base 2: mod_base = OTHER; note = 2'-O-methyluridine-3'-phosphorothioate
  modified_base 3: mod_base = OTHER; note = 2'-O-methyladenosine-3'-phosphate
  modified_base 4: mod_base = OTHER; note = 2'-O-methyladenosine-3'-phosphate
  modified_base 5: mod_base = OTHER; note = 2'-O-methyladenosine-3'-phosphate
  modified_base 6: mod_base = OTHER; note = 2'-O-methyluridine-3'-phosphate
  modified_base 7: mod_base = OTHER; note = 2'-O-methyladenosine-3'-phosphate
  modified_base 8: mod_base = OTHER; note = 2'-O-methylcytidine-3'-phosphate
  modified_base 9: mod_base = OTHER; note = 2'-deoxy-2'-fluorocytidine-3'-phosphate
  modified_base 10: mod_base = OTHER; note = 2'-deoxy-2'-fluoroadenosine-3'-phosphate
  modified_base 11: mod_base = OTHER; note = 2'-deoxy-2'-fluorouridine-3'-phosphate
  modified_base 12: mod_base = OTHER; note = 2'-O-methyluridine-3'-phosphate
  modified_base 13: mod_base = OTHER; note = 2'-O-methylcytidine-3'-phosphate
  modified_base 14: mod_base = OTHER; note = 2'-O-methylcytidine-3'-phosphate
  modified_base 15: mod_base = OTHER; note = 2'-O-methyladenosine-3'-phosphate
  modified_base 16: mod_base = OTHER; note = 2'-O-methyluridine-3'-phosphate
  modified_base 17: mod_base = OTHER; note = 2'-O-methyluridine-3'-phosphate
  modified_base 18: mod_base = OTHER; note = 2'-O-methylguanosine-3'-phosphate
  modified_base 19: mod_base = OTHER; note = 2'-O-methyluridine-3'-phosphorothioate
  modified_base 20: mod_base = OTHER; note = 2'-O-methyluridine-3'-phosphorothioate
  modified_base 21: mod_base = OTHER; note = 2'-O-methyladenosine
ctaaataccattccattgtta

SEQ ID NO: 847 - RNA, 21 nt, synthetic construct
  source 1..21: mol_type = other RNA
  modified_base 1: mod_base = OTHER; note = 2'-O-methyluridine-3'-phosphorothioate
  modified_base 2: mod_base = OTHER; note = 2'-O-methyladenosine-3'-phosphorothioate
  modified_base 3: mod_base = OTHER; note = 2'-O-methyladenosine-3'-phosphate
  modified_base 4: mod_base = OTHER; note = 2'-O-methyladenosine-3'-phosphate
  modified_base 5: mod_base = OTHER; note = 2'-O-methyluridine-3'-phosphate
  modified_base 6: mod_base = OTHER; note = 2'-O-methyladenosine-3'-phosphate
  modified_base 7: mod_base = OTHER; note = 2'-O-methylcytidine-3'-phosphate
  modified_base 8: mod_base = OTHER; note = 2'-O-methylcytidine-3'-phosphate
  modified_base 9: mod_base = OTHER; note = 2'-deoxy-2'-fluoroadenosine-3'-phosphate
  modified_base 10: mod_base = OTHER; note = 2'-deoxy-2'-fluorouridine-3'-phosphate
  modified_base 11: mod_base = OTHER; note = 2'-deoxy-2'-fluorouridine-3'-phosphate
  modified_base 12: mod_base = OTHER; note = 2'-O-methylcytidine-3'-phosphate
  modified_base 13: mod_base = OTHER; note = 2'-O-methylcytidine-3'-phosphate
  modified_base 14: mod_base = OTHER; note = 2'-O-methyladenosine-3'-phosphate
  modified_base 15: mod_base = OTHER; note = 2'-O-methyluridine-3'-phosphate
  modified_base 16: mod_base = OTHER; note = 2'-O-methyluridine-3'-phosphate
  modified_base 17: mod_base = OTHER; note = 2'-O-methylguanosine-3'-phosphate
  modified_base 18: mod_base = OTHER; note = 2'-O-methyluridine-3'-phosphate
  modified_base 19: mod_base = OTHER; note = 2'-O-methyluridine-3'-phosphorothioate
  modified_base 20: mod_base = OTHER; note = 2'-O-methyluridine-3'-phosphorothioate
  modified_base 21: mod_base = OTHER; note = 2'-O-methyladenosine
taaataccattccattgttta

SEQ ID NO: 848 - RNA, 21 nt, synthetic construct
  source 1..21: mol_type = other RNA
  modified_base 1: mod_base = OTHER; note = 2'-O-methyladenosine-3'-phosphorothioate
  modified_base 2: mod_base = OTHER; note = 2'-O-methyladenosine-3'-phosphorothioate
  modified_base 3: mod_base = OTHER; note = 2'-O-methyladenosine-3'-phosphate
  modified_base 4: mod_base = OTHER; note = 2'-O-methyluridine-3'-phosphate
  modified_base 5: mod_base = OTHER; note = 2'-O-methyladenosine-3'-phosphate
  modified_base 6: mod_base = OTHER; note = 2'-O-methylcytidine-3'-phosphate
  modified_base 7: mod_base = OTHER; note = 2'-O-methylcytidine-3'-phosphate
  modified_base 8: mod_base = OTHER; note = 2'-O-methyladenosine-3'-phosphate
  modified_base 9: mod_base = OTHER; note = 2'-deoxy-2'-fluorouridine-3'-phosphate
  modified_base 10: mod_base = OTHER; note = 2'-deoxy-2'-fluorouridine-3'-phosphate
  modified_base 11: mod_base = OTHER; note = 2'-deoxy-2'-fluorocytidine-3'-phosphate
  modified_base 12: mod_base = OTHER; note = 2'-O-methylcytidine-3'-phosphate
  modified_base 13: mod_base = OTHER; note = 2'-O-methyladenosine-3'-phosphate
  modified_base 14: mod_base = OTHER; note = 2'-O-methyluridine-3'-phosphate
  modified_base 15: mod_base = OTHER; note = 2'-O-methyluridine-3'-phosphate
  modified_base 16: mod_base = OTHER; note = 2'-O-methylguanosine-3'-phosphate
  modified_base 17: mod_base = OTHER; note = 2'-O-methyluridine-3'-phosphate
  modified_base 18: mod_base = OTHER; note = 2'-O-methyluridine-3'-phosphate
  modified_base 19: mod_base = OTHER; note = 2'-O-methyluridine-3'-phosphorothioate
  modified_base 20: mod_base = OTHER; note = 2'-O-methylguanosine-3'-phosphorothioate
  modified_base 21: mod_base = OTHER; note = 2'-O-methyladenosine
aaataccattccattgtttga

SEQ ID NO: 849 - RNA, 21 nt, synthetic construct
  source 1..21: mol_type = other RNA
  modified_base 1: mod_base = OTHER; note = 2'-O-methyladenosine-3'-phosphorothioate
  modified_base 2: mod_base = OTHER; note = 2'-O-methyladenosine-3'-phosphorothioate
  modified_base 3: mod_base = OTHER; note = 2'-O-methyluridine-3'-phosphate
  modified_base 4: mod_base = OTHER; note = 2'-O-methyladenosine-3'-phosphate
  modified_base 5: mod_base = OTHER; note = 2'-O-methylcytidine-3'-phosphate
  modified_base 6: mod_base = OTHER; note = 2'-O-methylcytidine-3'-phosphate
  modified_base 7: mod_base = OTHER; note = 2'-O-methyladenosine-3'-phosphate
  modified_base 8: mod_base = OTHER; note = 2'-O-methyluridine-3'-phosphate
  modified_base 9: mod_base = OTHER; note = 2'-deoxy-2'-fluorouridine-3'-phosphate
  modified_base 10: mod_base = OTHER; note = 2'-deoxy-2'-fluorocytidine-3'-phosphate
  modified_base 11: mod_base = OTHER; note = 2'-deoxy-2'-fluorocytidine-3'-phosphate
  modified_base 12: mod_base = OTHER; note = 2'-O-methyladenosine-3'-phosphate
  modified_base 13: mod_base = OTHER; note = 2'-O-methyluridine-3'-phosphate
  modified_base 14: mod_base = OTHER; note = 2'-O-methyluridine-3'-phosphate
  modified_base 15: mod_base = OTHER; note = 2'-O-methylguanosine-3'-phosphate
  modified_base 16: mod_base = OTHER; note = 2'-O-methyluridine-3'-phosphate
  modified_base 17: mod_base = OTHER; note = 2'-O-methyluridine-3'-phosphate
  modified_base 18: mod_base = OTHER; note = 2'-O-methyluridine-3'-phosphate
  modified_base 19: mod_base = OTHER; note = 2'-O-methylguanosine-3'-phosphorothioate
  modified_base 20: mod_base = OTHER; note = 2'-O-methyluridine-3'-phosphorothioate
  modified_base 21: mod_base = OTHER; note = 2'-O-methyladenosine
aataccattccattgtttgta

SEQ ID NO: 850 - RNA, 21 nt, synthetic construct
  source 1..21: mol_type = other RNA
  modified_base 1: mod_base = OTHER; note = 2'-O-methyladenosine-3'-phosphorothioate
  modified_base 2: mod_base = OTHER; note = 2'-O-methyluridine-3'-phosphorothioate
  modified_base 3: mod_base = OTHER; note = 2'-O-methyladenosine-3'-phosphate
  modified_base 4: mod_base = OTHER; note = 2'-O-methylcytidine-3'-phosphate
  modified_base 5: mod_base = OTHER; note = 2'-O-methylcytidine-3'-phosphate
  modified_base 6: mod_base = OTHER; note = 2'-O-methyladenosine-3'-phosphate
  modified_base 7: mod_base = OTHER; note = 2'-O-methyluridine-3'-phosphate
  modified_base 8: mod_base = OTHER; note = 2'-O-methyluridine-3'-phosphate
  modified_base 9: mod_base = OTHER; note = 2'-deoxy-2'-fluorocytidine-3'-phosphate
  modified_base 10: mod_base = OTHER; note = 2'-deoxy-2'-fluorocytidine-3'-phosphate
  modified_base 11: mod_base = OTHER; note = 2'-deoxy-2'-fluoroadenosine-3'-phosphate
  modified_base 12: mod_base = OTHER; note = 2'-O-methyluridine-3'-phosphate
  modified_base 13: mod_base = OTHER; note = 2'-O-methyluridine-3'-phosphate
  modified_base 14: mod_base = OTHER; note = 2'-O-methylguanosine-3'-phosphate
  modified_base 15: mod_base = OTHER; note = 2'-O-methyluridine-3'-phosphate
  modified_base 16: mod_base = OTHER; note = 2'-O-methyluridine-3'-phosphate
  modified_base 17: mod_base = OTHER; note = 2'-O-methyluridine-3'-phosphate
  modified_base 18: mod_base = OTHER; note = 2'-O-methylguanosine-3'-phosphate
  modified_base 19: mod_base = OTHER; note = 2'-O-methyluridine-3'-phosphorothioate
  modified_base 20: mod_base = OTHER; note = 2'-O-methylguanosine-3'-phosphorothioate
  modified_base 21: mod_base = OTHER; note = 2'-O-methyladenosine
ataccattccattgtttgtga

SEQ ID NO: 851 - RNA, 21 nt, synthetic construct
  source 1..21: mol_type = other RNA
  modified_base 1: mod_base = OTHER; note = 2'-O-methyladenosine-3'-phosphorothioate
  modified_base 2: mod_base = OTHER; note = 2'-O-methyluridine-3'-phosphorothioate
  modified_base 3: mod_base = OTHER; note = 2'-O-methyladenosine-3'-phosphate
  modified_base 4: mod_base = OTHER; note = 2'-O-methylcytidine-3'-phosphate
  modified_base 5: mod_base = OTHER; note = 2'-O-methylcytidine-3'-phosphate
  modified_base 6: mod_base = OTHER; note = 2'-O-methyladenosine-3'-phosphate
  modified_base 7: mod_base = OTHER; note = 2'-O-methyluridine-3'-phosphate
  modified_base 8: mod_base = OTHER; note = 2'-O-methyluridine-3'-phosphate
  modified_base 9: mod_base = OTHER; note = 2'-deoxy-2'-fluorocytidine-3'-phosphate
  modified_base 10: mod_base = OTHER; note = 2'-deoxy-2'-fluorocytidine-3'-phosphate
  modified_base 11: mod_base = OTHER; note = 2'-deoxy-2'-fluoroadenosine-3'-phosphate
  modified_base 12: mod_base = OTHER; note = 2'-O-methyluridine-3'-phosphate
  modified_base 13: mod_base = OTHER; note = 2'-O-methyluridine-3'-phosphate
  modified_base 14: mod_base = OTHER; note = 2'-O-methylguanosine-3'-phosphate
  modified_base 15: mod_base = OTHER; note = 2'-O-methyluridine-3'-phosphate
  modified_base 16: mod_base = OTHER; note = 2'-O-methyluridine-3'-phosphate
  modified_base 17: mod_base = OTHER; note = 2'-O-methyluridine-3'-phosphate
  modified_base 18: mod_base = OTHER; note = 2'-O-methylguanosine-3'-phosphate
  modified_base 19: mod_base = OTHER; note = 2'-O-methyluridine-3'-phosphorothioate
  modified_base 20: mod_base = OTHER; note = 2'-O-methylguanosine-3'-phosphorothioate
  modified_base 21: mod_base = OTHER; note = 2'-O-methyladenosine
ataccattccattgtttgtga

SEQ ID NO: 852 - RNA, 21 nt, synthetic construct
  source 1..21: mol_type = other RNA
  modified_base 1: mod_base = OTHER; note = 2'-O-methyluridine-3'-phosphorothioate
  modified_base 2: mod_base = OTHER; note = 2'-O-methyladenosine-3'-phosphorothioate
  modified_base 3: mod_base = OTHER; note = 2'-O-methylcytidine-3'-phosphate
  modified_base 4: mod_base = OTHER; note = 2'-O-methylcytidine-3'-phosphate
  modified_base 5: mod_base = OTHER; note = 2'-O-methyladenosine-3'-phosphate
  modified_base 6: mod_base = OTHER; note = 2'-O-methyluridine-3'-phosphate
  modified_base 7: mod_base = OTHER; note = 2'-O-methyluridine-3'-phosphate
  modified_base 8: mod_base = OTHER; note = 2'-O-methylcytidine-3'-phosphate
  modified_base 9: mod_base = OTHER; note = 2'-deoxy-2'-fluorocytidine-3'-phosphate
  modified_base 10: mod_base = OTHER; note = 2'-deoxy-2'-fluoroadenosine-3'-phosphate
  modified_base 11: mod_base = OTHER; note = 2'-deoxy-2'-fluorouridine-3'-phosphate
  modified_base 12: mod_base = OTHER; note = 2'-O-methyluridine-3'-phosphate
  modified_base 13: mod_base = OTHER; note = 2'-O-methylguanosine-3'-phosphate
  modified_base 14: mod_base = OTHER; note = 2'-O-methyluridine-3'-phosphate
  modified_base 15: mod_base = OTHER; note = 2'-O-methyluridine-3'-phosphate
  modified_base 16: mod_base = OTHER; note = 2'-O-methyluridine-3'-phosphate
  modified_base 17: mod_base = OTHER; note = 2'-O-methylguanosine-3'-phosphate
  modified_base 18: mod_base = OTHER; note = 2'-O-methyluridine-3'-phosphate
  modified_base 19: mod_base = OTHER; note = 2'-O-methylguanosine-3'-phosphorothioate
  modified_base 20: mod_base = OTHER; note = 2'-O-methylcytidine-3'-phosphorothioate
  modified_base 21: mod_base = OTHER; note = 2'-O-methyladenosine
taccattccattgtttgtgca

SEQ ID NO: 853 - RNA, 21 nt, synthetic construct
  source 1..21: mol_type = other RNA
  modified_base 1: mod_base = OTHER; note = 2'-O-methyladenosine-3'-phosphorothioate
  modified_base 2: mod_base = OTHER; note = 2'-O-methylcytidine-3'-phosphorothioate
  modified_base 3: mod_base = OTHER; note = 2'-O-methylcytidine-3'-phosphate
  modified_base 4: mod_base = OTHER; note = 2'-O-methyladenosine-3'-phosphate
  modified_base 5: mod_base = OTHER; note = 2'-O-methyluridine-3'-phosphate
  modified_base 6: mod_base = OTHER; note = 2'-O-methyluridine-3'-phosphate
  modified_base 7: mod_base = OTHER; note = 2'-O-methylcytidine-3'-phosphate
  modified_base 8: mod_base = OTHER; note = 2'-O-methylcytidine-3'-phosphate
  modified_base 9: mod_base = OTHER; note = 2'-deoxy-2'-fluoroadenosine-3'-phosphate
  modified_base 10: mod_base = OTHER; note = 2'-deoxy-2'-fluorouridine-3'-phosphate
  modified_base 11: mod_base = OTHER; note = 2'-deoxy-2'-fluorouridine-3'-phosphate
  modified_base 12: mod_base = OTHER; note = 2'-O-methylguanosine-3'-phosphate
  modified_base 13: mod_base = OTHER; note = 2'-O-methyluridine-3'-phosphate
  modified_base 14: mod_base = OTHER; note = 2'-O-methyluridine-3'-phosphate
  modified_base 15: mod_base = OTHER; note = 2'-O-methyluridine-3'-phosphate
  modified_base 16: mod_base = OTHER; note = 2'-O-methylguanosine-3'-phosphate
  modified_base 17: mod_base = OTHER; note = 2'-O-methyluridine-3'-phosphate
  modified_base 18: mod_base = OTHER; note = 2'-O-methylguanosine-3'-phosphate
  modified_base 19: mod_base = OTHER; note = 2'-O-methylcytidine-3'-phosphorothioate
  modified_base 20: mod_base = OTHER; note = 2'-O-methyladenosine-3'-phosphorothioate
  modified_base 21: mod_base = OTHER; note = 2'-O-methyladenosine
accattccattgtttgtgcaa

SEQ ID NO: 854 - RNA, 21 nt, synthetic construct
  source 1..21: mol_type = other RNA
  modified_base 1: mod_base = OTHER; note = 2'-O-methyladenosine-3'-phosphorothioate
  modified_base 2: mod_base = OTHER; note = 2'-O-methylcytidine-3'-phosphorothioate
  modified_base 3: mod_base = OTHER; note = 2'-O-methylcytidine-3'-phosphate
  modified_base 4: mod_base = OTHER; note = 2'-O-methyladenosine-3'-phosphate
  modified_base 5: mod_base = OTHER; note = 2'-O-methyluridine-3'-phosphate
  modified_base 6: mod_base = OTHER; note = 2'-O-methyluridine-3'-phosphate
  modified_base 7: mod_base = OTHER; note = 2'-deoxy-2'-fluorocytidine-3'-phosphate
  modified_base 8: mod_base = OTHER; note = 2'-O-methylcytidine-3'-phosphate
  modified_base 9: mod_base = OTHER; note = 2'-deoxy-2'-fluoroadenosine-3'-phosphate
  modified_base 10: mod_base = OTHER; note = 2'-deoxy-2'-fluorouridine-3'-phosphate
  modified_base 11: mod_base = OTHER; note = 2'-deoxy-2'-fluorouridine-3'-phosphate
  modified_base 12: mod_base = OTHER; note = 2'-O-methylguanosine-3'-phosphate
  modified_base 13: mod_base = OTHER; note = 2'-O-methyluridine-3'-phosphate
  modified_base 14: mod_base = OTHER; note = 2'-O-methyluridine-3'-phosphate
  modified_base 15: mod_base = OTHER; note = 2'-O-methyluridine-3'-phosphate
  modified_base 16: mod_base = OTHER; note = 2'-O-methylguanosine-3'-phosphate
  modified_base 17: mod_base = OTHER; note = 2'-O-methyluridine-3'-phosphate
  modified_base 18: mod_base = OTHER; note = 2'-O-methylguanosine-3'-phosphate
  modified_base 19: mod_base = OTHER; note = 2'-O-methylcytidine-3'-phosphorothioate
  modified_base 20: mod_base = OTHER; note = 2'-O-methyladenosine-3'-phosphorothioate
  modified_base 21: mod_base = OTHER; note = 2'-O-methyladenosine
accattccattgtttgtgcaa

SEQ ID NO: 855 - RNA, 21 nt, synthetic construct
  source 1..21: mol_type = other RNA
  modified_base 1: mod_base = OTHER; note = 2'-O-methylcytidine-3'-phosphorothioate
  modified_base 2: mod_base = OTHER; note = 2'-O-methylcytidine-3'-phosphorothioate
  modified_base 3: mod_base = OTHER; note = 2'-O-methyladenosine-3'-phosphate
  modified_base 4: mod_base = OTHER; note = 2'-O-methyluridine-3'-phosphate
  modified_base 5: mod_base = OTHER; note = 2'-O-methyluridine-3'-phosphate
  modified_base 6: mod_base = OTHER; note = 2'-O-methylcytidine-3'-phosphate
  modified_base 7: mod_base = OTHER; note = 2'-O-methylcytidine-3'-phosphate
  modified_base 8: mod_base = OTHER; note = 2'-O-methyladenosine-3'-phosphate
  modified_base 9: mod_base = OTHER; note = 2'-deoxy-2'-fluorouridine-3'-phosphate
  modified_base 10: mod_base = OTHER; note = 2'-deoxy-2'-fluorouridine-3'-phosphate
  modified_base 11: mod_base = OTHER; note = 2'-deoxy-2'-fluoroguanosine-3'-phosphate
  modified_base 12: mod_base = OTHER; note = 2'-O-methyluridine-3'-phosphate
  modified_base 13: mod_base = OTHER; note = 2'-O-methyluridine-3'-phosphate
  modified_base 14: mod_base = OTHER; note = 2'-O-methyluridine-3'-phosphate
  modified_base 15: mod_base = OTHER; note = 2'-O-methylguanosine-3'-phosphate
  modified_base 16: mod_base = OTHER; note = 2'-O-methyluridine-3'-phosphate
  modified_base 17: mod_base = OTHER; note = 2'-O-methylguanosine-3'-phosphate
  modified_base 18: mod_base = OTHER; note = 2'-O-methylcytidine-3'-phosphate
  modified_base 19: mod_base = OTHER; note = 2'-O-methyladenosine-3'-phosphorothioate
  modified_base 20: mod_base = OTHER; note = 2'-O-methylguanosine-3'-phosphorothioate
  modified_base 21: mod_base = OTHER; note = 2'-O-methyladenosine
ccattccattgtttgtgcaga

SEQ ID NO: 856 - RNA, 21 nt, synthetic construct
  source 1..21: mol_type = other RNA
  modified_base 1: mod_base = OTHER; note = 2'-O-methylcytidine-3'-phosphorothioate
  modified_base 2: mod_base = OTHER; note = 2'-O-methyladenosine-3'-phosphorothioate
  modified_base 3: mod_base = OTHER; note = 2'-O-methyluridine-3'-phosphate
  modified_base 4: mod_base = OTHER; note = 2'-O-methyluridine-3'-phosphate
  modified_base 5: mod_base = OTHER; note = 2'-O-methylcytidine-3'-phosphate
  modified_base 6: mod_base = OTHER; note = 2'-O-methylcytidine-3'-phosphate
  modified_base 7: mod_base = OTHER; note = 2'-deoxy-2'-fluoroadenosine-3'-phosphate
  modified_base 8: mod_base = OTHER; note = 2'-O-methyluridine-3'-phosphate
  modified_base 9: mod_base = OTHER; note = 2'-deoxy-2'-fluorouridine-3'-phosphate
  modified_base 10: mod_base = OTHER; note = 2'-deoxy-2'-fluoroguanosine-3'-phosphate
  modified_base 11: mod_base = OTHER; note = 2'-deoxy-2'-fluorouridine-3'-phosphate
  modified_base 12: mod_base = OTHER; note = 2'-O-methyluridine-3'-phosphate
  modified_base 13: mod_base = OTHER; note = 2'-O-methyluridine-3'-phosphate
  modified_base 14: mod_base = OTHER; note = 2'-O-methylguanosine-3'-phosphate
  modified_base 15: mod_base = OTHER; note = 2'-O-methyluridine-3'-phosphate
  modified_base 16: mod_base = OTHER; note = 2'-O-methylguanosine-3'-phosphate
  modified_base 17: mod_base = OTHER; note = 2'-O-methylcytidine-3'-phosphate
  modified_base 18: mod_base = OTHER; note = 2'-O-methyladenosine-3'-phosphate
  modified_base 19: mod_base = OTHER; note = 2'-O-methylguanosine-3'-phosphorothioate
  modified_base 20: mod_base = OTHER; note = 2'-O-methylcytidine-3'-phosphorothioate
  modified_base 21: mod_base = OTHER; note = 2'-O-methyladenosine
cattccattgtttgtgcagca

SEQ ID NO: 857 - RNA, 21 nt, synthetic construct
  source 1..21: mol_type = other RNA
  modified_base 1: mod_base = OTHER; note = 2'-O-methyluridine-3'-phosphorothioate
  modified_base 2: mod_base = OTHER; note = 2'-O-methylcytidine-3'-phosphorothioate
  modified_base 3: mod_base = OTHER; note = 2'-O-methylcytidine-3'-phosphate
  modified_base 4: mod_base = OTHER; note = 2'-O-methyladenosine-3'-phosphate
  modified_base 5: mod_base = OTHER; note = 2'-O-methyluridine-3'-phosphate
  modified_base 6: mod_base = OTHER; note = 2'-O-methyluridine-3'-phosphate
  modified_base 7: mod_base = OTHER; note = 2'-deoxy-2'-fluoroguanosine-3'-phosphate
  modified_base 8: mod_base = OTHER; note = 2'-O-methyluridine-3'-phosphate
  modified_base 9: mod_base = OTHER; note = 2'-deoxy-2'-fluorouridine-3'-phosphate
  modified_base 10: mod_base = OTHER; note = 2'-deoxy-2'-fluorouridine-3'-phosphate
  modified_base 11: mod_base = OTHER; note = 2'-deoxy-2'-fluoroguanosine-3'-phosphate
  modified_base 12: mod_base = OTHER; note = 2'-O-methyluridine-3'-phosphate
  modified_base 13: mod_base = OTHER; note = 2'-O-methylguanosine-3'-phosphate
  modified_base 14: mod_base = OTHER; note = 2'-O-methylcytidine-3'-phosphate
  modified_base 15: mod_base = OTHER; note = 2'-O-methyladenosine-3'-phosphate
  modified_base 16: mod_base = OTHER; note = 2'-O-methylguanosine-3'-phosphate
  modified_base 17: mod_base = OTHER; note = 2'-O-methylcytidine-3'-phosphate
  modified_base 18: mod_base = OTHER; note = 2'-O-methyluridine-3'-phosphate
  modified_base 19: mod_base = OTHER; note = 2'-O-methylguanosine-3'-phosphorothioate
  modified_base 20: mod_base = OTHER; note = 2'-O-methylcytidine-3'-phosphorothioate
  modified_base 21: mod_base = OTHER; note = 2'-O-methyladenosine
tccattgtttgtgcagctgca

SEQ ID NO: 858 - RNA, 21 nt, synthetic construct
  source 1..21: mol_type = other RNA
  modified_base 1: mod_base = OTHER; note = 2'-O-methylguanosine-3'-phosphorothioate
  modified_base 2: mod_base = OTHER; note = 2'-O-methyluridine-3'-phosphorothioate
  modified_base 3: mod_base = OTHER; note = 2'-O-methyluridine-3'-phosphate
  modified_base 4: mod_base = OTHER; note = 2'-O-methyluridine-3'-phosphate
  modified_base 5: mod_base = OTHER; note = 2'-O-methylguanosine-3'-phosphate
  modified_base 6: mod_base = OTHER; note = 2'-O-methyluridine-3'-phosphate
  modified_base 7: mod_base = OTHER; note = 2'-O-methylguanosine-3'-phosphate
  modified_base 8: mod_base = OTHER; note = 2'-O-methylcytidine-3'-phosphate
  modified_base 9: mod_base = OTHER; note = 2'-deoxy-2'-fluoroadenosine-3'-phosphate
  modified_base 10: mod_base = OTHER; note = 2'-deoxy-2'-fluoroguanosine-3'-phosphate
  modified_base 11: mod_base = OTHER; note = 2'-deoxy-2'-fluorocytidine-3'-phosphate
  modified_base 12: mod_base = OTHER; note = 2'-O-methyluridine-3'-phosphate
  modified_base 13: mod_base = OTHER; note = 2'-O-methylguanosine-3'-phosphate
  modified_base 14: mod_base = OTHER; note = 2'-O-methylcytidine-3'-phosphate
  modified_base 15: mod_base = OTHER; note = 2'-O-methyluridine-3'-phosphate
  modified_base 16: mod_base = OTHER; note = 2'-O-methyluridine-3'-phosphate
  modified_base 17: mod_base = OTHER; note = 2'-O-methyluridine-3'-phosphate
  modified_base 18: mod_base = OTHER; note = 2'-O-methyladenosine-3'-phosphate
  modified_base 19: mod_base = OTHER; note = 2'-O-methyluridine-3'-phosphorothioate
  modified_base 20: mod_base = OTHER; note = 2'-O-methyluridine-3'-phosphorothioate
  modified_base 21: mod_base = OTHER; note = 2'-O-methyladenosine
gtttgtgcagctgctttatta

SEQ ID NO: 859 - RNA, 21 nt, synthetic construct
  source 1..21: mol_type = other RNA
  modified_base 1: mod_base = OTHER; note = 2'-O-methylcytidine-3'-phosphorothioate
  modified_base 2: mod_base = OTHER; note = 2'-O-methyluridine-3'-phosphorothioate
  modified_base 3: mod_base = OTHER; note = 2'-O-methylcytidine-3'-phosphate
  modified_base 4: mod_base = OTHER; note = 2'-O-methylcytidine-3'-phosphate
  modified_base 5: mod_base = OTHER; note = 2'-O-methyluridine-3'-phosphate
  modified_base 6: mod_base = OTHER; note = 2'-O-methylcytidine-3'-phosphate
  modified_base 7: mod_base = OTHER; note = 2'-O-methyluridine-3'-phosphate
  modified_base 8: mod_base = OTHER; note = 2'-O-methylguanosine-3'-phosphate
  modified_base 9: mod_base = OTHER; note = 2'-deoxy-2'-fluoroadenosine-3'-phosphate
  modified_base 10: mod_base = OTHER; note = 2'-deoxy-2'-fluorocytidine-3'-phosphate
  modified_base 11: mod_base = OTHER; note = 2'-deoxy-2'-fluoroadenosine-3'-phosphate
  modified_base 12: mod_base = OTHER; note = 2'-O-methylguanosine-3'-phosphate
  modified_base 13: mod_base = OTHER; note = 2'-O-methyladenosine-3'-phosphate
  modified_base 14: mod_base = OTHER; note = 2'-O-methylguanosine-3'-phosphate
  modified_base 15: mod_base = OTHER; note = 2'-O-methyluridine-3'-phosphate
  modified_base 16: mod_base = OTHER; note = 2'-O-methyluridine-3'-phosphate
  modified_base 17: mod_base = OTHER; note = 2'-O-methyladenosine-3'-phosphate
  modified_base 18: mod_base = OTHER; note = 2'-O-methylcytidine-3'-phosphate
  modified_base 19: mod_base = OTHER; note = 2'-O-methyluridine-3'-phosphorothioate
  modified_base 20: mod_base = OTHER; note = 2'-O-methyluridine-3'-phosphorothioate
  modified_base 21: mod_base = OTHER; note = 2'-O-methyladenosine
ctcctctgacagagttactta

SEQ ID NO: 860 - RNA, 21 nt, synthetic construct
  source 1..21: mol_type = other RNA
  modified_base 1: mod_base = OTHER; note = 2'-O-methylguanosine-3'-phosphorothioate
  modified_base 2: mod_base = OTHER; note = 2'-O-methyladenosine-3'-phosphorothioate
  modified_base 3: mod_base = OTHER; note = 2'-O-methylcytidine-3'-phosphate
  modified_base 4: mod_base = OTHER; note = 2'-O-methyladenosine-3'-phosphate
  modified_base 5: mod_base = OTHER; note = 2'-O-methylguanosine-3'-phosphate
  modified_base 6: mod_base = OTHER; note = 2'-O-methyladenosine-3'-phosphate
  modified_base 7: mod_base = OTHER; note = 2'-deoxy-2'-fluoroguanosine-3'-phosphate
  modified_base 8: mod_base = OTHER; note = 2'-O-methyluridine-3'-phosphate
  modified_base 9: mod_base = OTHER; note = 2'-deoxy-2'-fluorouridine-3'-phosphate
  modified_base 10: mod_base = OTHER; note = 2'-deoxy-2'-fluoroadenosine-3'-phosphate
  modified_base 11: mod_base = OTHER; note = 2'-deoxy-2'-fluorocytidine-3'-phosphate
  modified_base 12: mod_base = OTHER; note = 2'-O-methyluridine-3'-phosphate
  modified_base 13: mod_base = OTHER; note = 2'-O-methyluridine-3'-phosphate
  modified_base 14: mod_base = OTHER; note = 2'-O-methylcytidine-3'-phosphate
  modified_base 15: mod_base = OTHER; note = 2'-O-methyladenosine-3'-phosphate
  modified_base 16: mod_base = OTHER; note = 2'-O-methylcytidine-3'-phosphate
  modified_base 17: mod_base = OTHER; note = 2'-O-methyluridine-3'-phosphate
  modified_base 18: mod_base = OTHER; note = 2'-O-methylcytidine-3'-phosphate
  modified_base 19: mod_base = OTHER; note = 2'-O-methyluridine-3'-phosphorothioate
  modified_base 20: mod_base = OTHER; note = 2'-O-methyladenosine-3'-phosphorothioate
  modified_base 21: mod_base = OTHER; note = 2'-O-methyladenosine
gacagagttacttcactctaa

SEQ ID NO: 861 - RNA, 21 nt, synthetic construct
  source 1..21: mol_type = other RNA
  modified_base 1: mod_base = OTHER; note = 2'-O-methyladenosine-3'-phosphorothioate
  modified_base 2: mod_base = OTHER; note = 2'-O-methylguanosine-3'-phosphorothioate
  modified_base 3: mod_base = OTHER; note = 2'-O-methyluridine-3'-phosphate
  modified_base 4: mod_base = OTHER; note = 2'-O-methyluridine-3'-phosphate
  modified_base 5: mod_base = OTHER; note = 2'-O-methyladenosine-3'-phosphate
  modified_base 6: mod_base = OTHER; note = 2'-O-methylcytidine-3'-phosphate
  modified_base 7: mod_base = OTHER; note = 2'-deoxy-2'-fluorouridine-3'-phosphate
  modified_base 8: mod_base = OTHER; note = 2'-O-methyluridine-3'-phosphate
  modified_base 9: mod_base = OTHER; note = 2'-deoxy-2'-fluorocytidine-3'-phosphate
  modified_base 10: mod_base = OTHER; note = 2'-deoxy-2'-fluoroadenosine-3'-phosphate
  modified_base 11: mod_base = OTHER; note = 2'-deoxy-2'-fluorocytidine-3'-phosphate
  modified_base 12: mod_base = OTHER; note = 2'-O-methyluridine-3'-phosphate
  modified_base 13: mod_base = OTHER; note = 2'-O-methylcytidine-3'-phosphate
  modified_base 14: mod_base = OTHER; note = 2'-O-methyluridine-3'-phosphate
  modified_base 15: mod_base = OTHER; note = 2'-O-methyladenosine-3'-phosphate
  modified_base 16: mod_base = OTHER; note = 2'-O-methylguanosine-3'-phosphate
  modified_base 17: mod_base = OTHER; note = 2'-O-methylguanosine-3'-phosphate
  modified_base 18: mod_base = OTHER; note = 2'-O-methyladenosine-3'-phosphate
  modified_base 19: mod_base = OTHER; note = 2'-O-methyladenosine-3'-phosphorothioate
  modified_base 20: mod_base = OTHER; note = 2'-O-methyluridine-3'-phosphorothioate
  modified_base 21: mod_base = OTHER; note = 2'-O-methyladenosine
agttacttcactctaggaata

SEQ ID NO: 862 - RNA, 21 nt, synthetic construct
  source 1..21: mol_type = other RNA
  modified_base 1: mod_base = OTHER; note = 2'-O-methylguanosine-3'-phosphorothioate
  modified_base 2: mod_base = OTHER; note = 2'-O-methyladenosine-3'-phosphorothioate
  modified_base 3: mod_base = OTHER; note = 2'-O-methylguanosine-3'-phosphate
  modified_base 4: mod_base = OTHER; note = 2'-O-methylguanosine-3'-phosphate
  modified_base 5: mod_base = OTHER; note = 2'-O-methyladenosine-3'-phosphate
  modified_base 6: mod_base = OTHER; note = 2'-O-methylcytidine-3'-phosphate
  modified_base 7: mod_base = OTHER; note = 2'-deoxy-2'-fluoroadenosine-3'-phosphate
  modified_base 8: mod_base = OTHER; note = 2'-O-methyladenosine-3'-phosphate
  modified_base 9: mod_base = OTHER; note = 2'-deoxy-2'-fluoroguanosine-3'-phosphate
  modified_base 10: mod_base = OTHER; note = 2'-deoxy-2'-fluorocytidine-3'-phosphate
  modified_base 11: mod_base = OTHER; note = 2'-deoxy-2'-fluorocytidine-3'-phosphate
  modified_base 12: mod_base = OTHER; note = 2'-O-methyladenosine-3'-phosphate
  modified_base 13: mod_base = OTHER; note = 2'-O-methylcytidine-3'-phosphate
  modified_base 14: mod_base = OTHER; note = 2'-O-methyladenosine-3'-phosphate
  modified_base 15: mod_base = OTHER; note = 2'-O-methyladenosine-3'-phosphate
  modified_base 16: mod_base = OTHER; note = 2'-O-methylguanosine-3'-phosphate
  modified_base 17: mod_base = OTHER; note = 2'-O-methyladenosine-3'-phosphate
  modified_base 18: mod_base = OTHER; note = 2'-O-methyluridine-3'-phosphate
  modified_base 19: mod_base = OTHER; note = 2'-O-methyluridine-3'-phosphorothioate
  modified_base 20: mod_base = OTHER; note = 2'-O-methyladenosine-3'-phosphorothioate
  modified_base 21: mod_base = OTHER; note = 2'-O-methyladenosine
gaggacaagccacaagattaa

SEQ ID NO: 863 - RNA, 21 nt, synthetic construct
  source 1..21: mol_type = other RNA
  modified_base 1: mod_base = OTHER; note = 2'-O-methylcytidine-3'-phosphorothioate
  modified_base 2: mod_base = OTHER; note = 2'-O-methyladenosine-3'-phosphorothioate
  modified_base 3: mod_base = OTHER; note = 2'-O-methylcytidine-3'-phosphate
  modified_base 4: mod_base = OTHER; note = 2'-O-methyladenosine-3'-phosphate
  modified_base 5: mod_base = OTHER; note = 2'-O-methyladenosine-3'-phosphate
  modified_base 6: mod_base = OTHER; note = 2'-O-methylguanosine-3'-phosphate
  modified_base 7: mod_base = OTHER; note = 2'-O-methyladenosine-3'-phosphate
  modified_base 8: mod_base = OTHER; note = 2'-O-methyluridine-3'-phosphate
  modified_base 9: mod_base = OTHER; note = 2'-deoxy-2'-fluorouridine-3'-phosphate
  modified_base 10: mod_base = OTHER; note = 2'-deoxy-2'-fluoroadenosine-3'-phosphate
  modified_base 11: mod_base = OTHER; note = 2'-deoxy-2'-fluorocytidine-3'-phosphate
  modified_base 12: mod_base = OTHER; note = 2'-O-methyladenosine-3'-phosphate
  modified_base 13: mod_base = OTHER; note = 2'-O-methyladenosine-3'-phosphate
  modified_base 14: mod_base = OTHER; note = 2'-O-methylguanosine-3'-phosphate
  modified_base 15: mod_base = OTHER; note = 2'-O-methyladenosine-3'-phosphate
  modified_base 16: mod_base = OTHER; note = 2'-O-methyladenosine-3'-phosphate
  modified_base 17: mod_base = OTHER; note = 2'-O-methyladenosine-3'-phosphate
  modified_base 18: mod_base = OTHER; note = 2'-O-methylcytidine-3'-phosphate
  modified_base 19: mod_base = OTHER; note = 2'-O-methylguanosine-3'-phosphorothioate
  modified_base 20: mod_base = OTHER; note = 2'-O-methylguanosine-3'-phosphorothioate
  modified_base 21: mod_base = OTHER; note = 2'-O-methyladenosine
cacaagattacaagaaacgga

SEQ ID NO: 864 - RNA, 21 nt, synthetic construct
  source 1..21: mol_type = other RNA
  modified_base 1: mod_base = OTHER; note = 2'-O-methyladenosine-3'-phosphorothioate
  modified_base 2: mod_base = OTHER; note = 2'-O-methylcytidine-3'-phosphorothioate
  modified_base 3: mod_base = OTHER; note = 2'-O-methyladenosine-3'-phosphate
  modified_base 4: mod_base = OTHER; note = 2'-O-methyladenosine-3'-phosphate
  modified_base 5: mod_base = OTHER; note = 2'-O-methylguanosine-3'-phosphate
  modified_base 6: mod_base = OTHER; note = 2'-O-methyladenosine-3'-phosphate
  modified_base 7: mod_base = OTHER; note = 2'-O-methyluridine-3'-phosphate
  modified_base 8: mod_base = OTHER; note = 2'-O-methyluridine-3'-phosphate
  modified_base 9: mod_base = OTHER; note = 2'-deoxy-2'-fluoroadenosine-3'-phosphate
  modified_base 10: mod_base = OTHER; note = 2'-deoxy-2'-fluorocytidine-3'-phosphate
  modified_base 11: mod_base = OTHER; note = 2'-deoxy-2'-fluoroadenosine-3'-phosphate
  modified_base 12: mod_base = OTHER; note = 2'-O-methyladenosine-3'-phosphate
  modified_base 13: mod_base = OTHER; note = 2'-O-methylguanosine-3'-phosphate
  modified_base 14: mod_base = OTHER; note = 2'-O-methyladenosine-3'-phosphate
  modified_base 15: mod_base = OTHER; note = 2'-O-methyladenosine-3'-phosphate
  modified_base 16: mod_base = OTHER; note = 2'-O-methyladenosine-3'-phosphate
  modified_base 17: mod_base = OTHER; note = 2'-O-methylcytidine-3'-phosphate
  modified_base 18: mod_base = OTHER; note = 2'-O-methylguanosine-3'-phosphate
  modified_base 19: mod_base = OTHER; note = 2'-O-methylguanosine-3'-phosphorothioate
  modified_base 20: mod_base = OTHER; note = 2'-O-methylcytidine-3'-phosphorothioate
  modified_base 21: mod_base = OTHER; note = 2'-O-methyladenosine
acaagattacaagaaacggca

SEQ ID NO: 865 - RNA, 21 nt, synthetic construct
  source 1..21: mol_type = other RNA
  modified_base 1: mod_base = OTHER; note = 2'-O-methylcytidine-3'-phosphorothioate
  modified_base 2: mod_base = OTHER; note = 2'-O-methyladenosine-3'-phosphorothioate
  modified_base 3: mod_base = OTHER; note = 2'-O-methyladenosine-3'-phosphate
  modified_base 4: mod_base = OTHER; note = 2'-O-methylguanosine-3'-phosphate
  modified_base 5: mod_base = OTHER; note = 2'-O-methyladenosine-3'-phosphate
  modified_base 6: mod_base = OTHER; note = 2'-O-methyluridine-3'-phosphate
  modified_base 7: mod_base = OTHER; note = 2'-O-methyluridine-3'-phosphate
  modified_base 8: mod_base = OTHER; note = 2'-O-methyladenosine-3'-phosphate
  modified_base 9: mod_base = OTHER; note = 2'-deoxy-2'-fluorocytidine-3'-phosphate
  modified_base 10: mod_base = OTHER; note = 2'-deoxy-2'-fluoroadenosine-3'-phosphate
  modified_base 11: mod_base = OTHER; note = 2'-deoxy-2'-fluoroadenosine-3'-phosphate
  modified_base 12: mod_base = OTHER; note = 2'-O-methylguanosine-3'-phosphate
  modified_base 13: mod_base = OTHER; note = 2'-O-methyladenosine-3'-phosphate
  modified_base 14: mod_base = OTHER; note = 2'-O-methyladenosine-3'-phosphate
  modified_base 15: mod_base = OTHER; note = 2'-O-methyladenosine-3'-phosphate
  modified_base 16: mod_base = OTHER; note = 2'-O-methylcytidine-3'-phosphate
  modified_base 17: mod_base = OTHER; note = 2'-O-methylguanosine-3'-phosphate
  modified_base 18: mod_base = OTHER; note = 2'-O-methylguanosine-3'-phosphate
  modified_base 19: mod_base = OTHER; note = 2'-O-methylcytidine-3'-phosphorothioate
  modified_base 20: mod_base = OTHER; note = 2'-O-methyluridine-3'-phosphorothioate
  modified_base 21: mod_base = OTHER; note = 2'-O-methyladenosine
caagattacaagaaacggcta

SEQ ID NO: 866 - RNA, 21 nt, synthetic construct
  source 1..21: mol_type = other RNA
  modified_base 1: mod_base = OTHER; note = 2'-O-methyladenosine-3'-phosphorothioate
  modified_base 2: mod_base = OTHER; note = 2'-O-methyladenosine-3'-phosphorothioate
  modified_base 3: mod_base = OTHER; note = 2'-O-methylguanosine-3'-phosphate
  modified_base 4: mod_base = OTHER; note = 2'-O-methyladenosine-3'-phosphate
  modified_base 5: mod_base = OTHER; note = 2'-O-methyluridine-3'-phosphate
  modified_base 6: mod_base = OTHER; note = 2'-O-methyluridine-3'-phosphate
  modified_base 7: mod_base = OTHER; note = 2'-O-methyladenosine-3'-phosphate
  modified_base 8: mod_base = OTHER; note = 2'-O-methylcytidine-3'-phosphate
  modified_base 9: mod_base = OTHER; note = 2'-deoxy-2'-fluoroadenosine-3'-phosphate
  modified_base 10: mod_base = OTHER; note = 2'-deoxy-2'-fluoroadenosine-3'-phosphate
  modified_base 11: mod_base = OTHER; note = 2'-deoxy-2'-fluoroguanosine-3'-phosphate
  modified_base 12: mod_base = OTHER; note = 2'-O-methyladenosine-3'-phosphate
  modified_base 13: mod_base = OTHER; note = 2'-O-methyladenosine-3'-phosphate
  modified_base 14: mod_base = OTHER; note = 2'-O-methyladenosine-3'-phosphate
  modified_base 15: mod_base = OTHER; note = 2'-O-methylcytidine-3'-phosphate
  modified_base 16: mod_base = OTHER; note = 2'-O-methylguanosine-3'-phosphate
  modified_base 17: mod_base = OTHER; note = 2'-O-methylguanosine-3'-phosphate
  modified_base 18: mod_base = OTHER; note = 2'-O-methylcytidine-3'-phosphate
  modified_base 19: mod_base = OTHER; note = 2'-O-methyluridine-3'-phosphorothioate
  modified_base 20: mod_base = OTHER; note = 2'-O-methyluridine-3'-phosphorothioate
  modified_base 21: mod_base = OTHER; note = 2'-O-methyladenosine
aagattacaagaaacggctta

SEQ ID NO: 867 - RNA, 21 nt, synthetic construct
  source 1..21: mol_type = other RNA
  modified_base 1: mod_base = OTHER; note = 2'-O-methyluridine-3'-phosphorothioate
  modified_base 2: mod_base = OTHER; note = 2'-O-methyluridine-3'-phosphorothioate
  modified_base 3: mod_base = OTHER; note = 2'-O-methyladenosine-3'-phosphate
  modified_base 4: mod_base = OTHER; note = 2'-O-methylcytidine-3'-phosphate
  modified_base 5: mod_base = OTHER; note = 2'-O-methyladenosine-3'-phosphate
  modified_base 6: mod_base = OTHER; note = 2'-O-methyladenosine-3'-phosphate
  modified_base 7: mod_base = OTHER; note = 2'-O-methylguanosine-3'-phosphate
  modified_base 8: mod_base = OTHER; note = 2'-O-methyladenosine-3'-phosphate
  modified_base 9: mod_base = OTHER; note = 2'-deoxy-2'-fluoroadenosine-3'-phosphate
  modified_base 10: mod_base = OTHER; note = 2'-deoxy-2'-fluoroadenosine-3'-phosphate
  modified_base 11: mod_base = OTHER; note = 2'-deoxy-2'-fluorocytidine-3'-phosphate
  modified_base 12: mod_base = OTHER; note = 2'-O-methylguanosine-3'-phosphate
  modified_base 13: mod_base = OTHER; note = 2'-O-methylguanosine-3'-phosphate
  modified_base 14: mod_base = OTHER; note = 2'-O-methylcytidine-3'-phosphate
  modified_base 15: mod_base = OTHER; note = 2'-O-methyluridine-3'-phosphate
  modified_base 16: mod_base = OTHER; note = 2'-O-methyluridine-3'-phosphate
  modified_base 17: mod_base = OTHER; note = 2'-O-methyluridine-3'-phosphate
  modified_base 18: mod_base = OTHER; note = 2'-O-methylcytidine-3'-phosphate
  modified_base 19: mod_base = OTHER; note = 2'-O-methyladenosine-3'-phosphorothioate
  modified_base 20: mod_base = OTHER; note = 2'-O-methylguanosine-3'-phosphorothioate
  modified_base 21: mod_base = OTHER; note = 2'-O-methyladenosine
ttacaagaaacggctttcaga

SEQ ID NO: 868 - RNA, 21 nt, synthetic construct
  source 1..21: mol_type = other RNA
  modified_base 1: mod_base = OTHER; note = 2'-O-methyluridine-3'-phosphorothioate
  modified_base 2: mod_base = OTHER; note = 2'-O-methyladenosine-3'-phosphorothioate
  modified_base 3: mod_base = OTHER; note = 2'-O-methylcytidine-3'-phosphate
  modified_base 4: mod_base = OTHER; note = 2'-O-methyladenosine-3'-phosphate
  modified_base 5: mod_base = OTHER; note = 2'-O-methyladenosine-3'-phosphate
  modified_base 6: mod_base = OTHER; note = 2'-O-methylguanosine-3'-phosphate
  modified_base 7: mod_base = OTHER; note = 2'-O-methyladenosine-3'-phosphate
  modified_base 8: mod_base = OTHER; note = 2'-O-methyladenosine-3'-phosphate
  modified_base 9: mod_base = OTHER; note = 2'-deoxy-2'-fluoroadenosine-3'-phosphate
  modified_base 10: mod_base = OTHER; note = 2'-deoxy-2'-fluorocytidine-3'-phosphate
  modified_base 11: mod_base = OTHER; note = 2'-deoxy-2'-fluoroguanosine-3'-phosphate
  modified_base 12: mod_base = OTHER; note = 2'-O-methylguanosine-3'-phosphate
  modified_base 13: mod_base = OTHER; note = 2'-O-methylcytidine-3'-phosphate
  modified_base 14: mod_base = OTHER; note = 2'-O-methyluridine-3'-phosphate
  modified_base 15: mod_base = OTHER; note = 2'-O-methyluridine-3'-phosphate
  modified_base 16: mod_base = OTHER; note = 2'-O-methyluridine-3'-phosphate
  modified_base 17: mod_base = OTHER; note = 2'-O-methylcytidine-3'-phosphate
  modified_base 18: mod_base = OTHER; note = 2'-O-methyladenosine-3'-phosphate
  modified_base 19: mod_base = OTHER; note = 2'-O-methylguanosine-3'-phosphorothioate
  modified_base 20: mod_base = OTHER; note = 2'-O-methyluridine-3'-phosphorothioate
  modified_base 21: mod_base = OTHER; note = 2'-O-methyladenosine
tacaagaaacggctttcagta

SEQ ID NO: 869 - RNA, 21 nt, synthetic construct
  source 1..21: mol_type = other RNA
  modified_base 1: mod_base = OTHER; note = 2'-O-methyladenosine-3'-phosphorothioate
  modified_base 2: mod_base = OTHER; note = 2'-O-methyladenosine-3'-phosphorothioate
  modified_base 3: mod_base = OTHER; note = 2'-O-methyladenosine-3'-phosphate
  modified_base 4: mod_base = OTHER; note = 2'-O-methylcytidine-3'-phosphate
  modified_base 5: mod_base = OTHER; note = 2'-O-methylguanosine-3'-phosphate
  modified_base 6: mod_base = OTHER; note = 2'-O-methylguanosine-3'-phosphate
  modified_base 7: mod_base = OTHER; note = 2'-deoxy-2'-fluorocytidine-3'-phosphate
  modified_base 8: mod_base = OTHER; note = 2'-O-methyluridine-3'-phosphate
  modified_base 9: mod_base = OTHER; note = 2'-deoxy-2'-fluorouridine-3'-phosphate
  modified_base 10: mod_base = OTHER; note = 2'-deoxy-2'-fluorouridine-3'-phosphate
  modified_base 11: mod_base = OTHER; note = 2'-deoxy-2'-fluorocytidine-3'-phosphate
  modified_base 12: mod_base = OTHER; note = 2'-O-methyladenosine-3'-phosphate
  modified_base 13: mod_base = OTHER; note = 2'-O-methylguanosine-3'-phosphate
  modified_base 14: mod_base = OTHER; note = 2'-O-methyluridine-3'-phosphate
  modified_base 15: mod_base = OTHER; note = 2'-O-methyluridine-3'-phosphate
  modified_base 16: mod_base = OTHER; note = 2'-O-methylguanosine-3'-phosphate
  modified_base 17: mod_base = OTHER; note = 2'-O-methyladenosine-3'-phosphate
  modified_base 18: mod_base = OTHER; note = 2'-O-methylguanosine-3'-phosphate
  modified_base 19: mod_base = OTHER; note = 2'-O-methylcytidine-3'-phosphorothioate
  modified_base 20: mod_base = OTHER; note = 2'-O-methyluridine-3'-phosphorothioate
  modified_base 21: mod_base = OTHER; note = 2'-O-methyladenosine
aaacggctttcagttgagcta

SEQ ID NO: 870 - RNA, 21 nt, synthetic construct
  source 1..21: mol_type = other RNA
  modified_base 1: mod_base = OTHER; note = 2'-O-methylguanosine-3'-phosphorothioate
  modified_base 2: mod_base = OTHER; note = 2'-O-methylcytidine-3'-phosphorothioate
  modified_base 3: mod_base = OTHER; note = 2'-O-methyluridine-3'-phosphate
  modified_base 4: mod_base = OTHER; note = 2'-O-methyluridine-3'-phosphate
  modified_base 5: mod_base = OTHER; note = 2'-O-methyluridine-3'-phosphate
  modified_base 6: mod_base = OTHER; note = 2'-O-methylcytidine-3'-phosphate
  modified_base 7: mod_base = OTHER; note = 2'-deoxy-2'-fluoroadenosine-3'-phosphate
  modified_base 8: mod_base = OTHER; note = 2'-O-methylguanosine-3'-phosphate
  modified_base 9: mod_base = OTHER; note = 2'-deoxy-2'-fluorouridine-3'-phosphate
  modified_base 10: mod_base = OTHER; note = 2'-deoxy-2'-fluorouridine-3'-phosphate
  modified_base 11: mod_base = OTHER; note = 2'-deoxy-2'-fluoroguanosine-3'-phosphate
  modified_base 12: mod_base = OTHER; note = 2'-O-methyladenosine-3'-phosphate
  modified_base 13: mod_base = OTHER; note = 2'-O-methylguanosine-3'-phosphate
  modified_base 14: mod_base = OTHER; note = 2'-O-methylcytidine-3'-phosphate
  modified_base 15: mod_base = OTHER; note = 2'-O-methyluridine-3'-phosphate
  modified_base 16: mod_base = OTHER; note = 2'-O-methylguanosine-3'-phosphate
  modified_base 17: mod_base = OTHER; note = 2'-O-methyladenosine-3'-phosphate
  modified_base 18: mod_base = OTHER; note = 2'-O-methylcytidine-3'-phosphate
  modified_base 19: mod_base = OTHER; note = 2'-O-methylcytidine-3'-phosphorothioate
  modified_base 20: mod_base = OTHER; note = 2'-O-methyladenosine-3'-phosphorothioate
  modified_base 21: mod_base = OTHER; note = 2'-O-methyladenosine
gctttcagttgagctgaccaa

SEQ ID NO: 871 - RNA, 21 nt, synthetic construct
  source 1..21: mol_type = other RNA
  modified_base 1: mod_base = OTHER; note = 2'-O-methylcytidine-3'-phosphorothioate
  modified_base 2: mod_base = OTHER; note = 2'-O-methyluridine-3'-phosphorothioate
  modified_base 3: mod_base = OTHER; note = 2'-O-methyluridine-3'-phosphate
  modified_base 4: mod_base = OTHER; note = 2'-O-methylguanosine-3'-phosphate
  modified_base 5: mod_base = OTHER; note = 2'-O-methylguanosine-3'-phosphate
  modified_base 6: mod_base = OTHER; note = 2'-O-methyladenosine-3'-phosphate
  modified_base 7: mod_base = OTHER; note = 2'-O-methylcytidine-3'-phosphate
  modified_base 8: mod_base = OTHER; note = 2'-O-methyluridine-3'-phosphate
  modified_base 9: mod_base = OTHER; note = 2'-deoxy-2'-fluorouridine-3'-phosphate
  modified_base 10: mod_base = OTHER; note = 2'-deoxy-2'-fluoroguanosine-3'-phosphate
  modified_base 11: mod_base = OTHER; note = 2'-deoxy-2'-fluoroadenosine-3'-phosphate
  modified_base 12: mod_base = OTHER; note = 2'-O-methyluridine-3'-phosphate
  modified_base 13: mod_base = OTHER; note = 2'-O-methyladenosine-3'-phosphate
  modified_base 14: mod_base = OTHER; note = 2'-O-methyluridine-3'-phosphate
  modified_base 15: mod_base = OTHER; note = 2'-O-methyluridine-3'-phosphate
  modified_base 16: mod_base = OTHER; note = 2'-O-methylguanosine-3'-phosphate
  modified_base 17: mod_base = OTHER; note = 2'-O-methylguanosine-3'-phosphate
  modified_base 18: mod_base = OTHER; note = 2'-O-methyluridine-3'-phosphate
  modified_base 19: mod_base = OTHER; note = 2'-O-methylguanosine-3'-phosphorothioate
  modified_base 20: mod_base = OTHER; note = 2'-O-methylcytidine-3'-phosphorothioate
  modified_base 21: mod_base = OTHER; note = 2'-O-methyladenosine
cttggacttgatattggtgca

SEQ ID NO: 872 - RNA, 21 nt, synthetic construct
  source 1..21: mol_type = other RNA
  modified_base 1: mod_base = OTHER; note = 2'-O-methyluridine-3'-phosphorothioate
  modified_base 2: mod_base = OTHER; note = 2'-O-methyladenosine-3'-phosphorothioate
  modified_base 3: mod_base = OTHER; note = 2'-O-methyluridine-3'-phosphate
  modified_base 4: mod_base = OTHER; note = 2'-O-methylcytidine-3'-phosphate
  modified_base 5: mod_base = OTHER; note = 2'-O-methylguanosine-3'-phosphate
  modified_base 6: mod_base = OTHER; note = 2'-O-methylcytidine-3'-phosphate
  modified_base 7: mod_base = OTHER; note = 2'-deoxy-2'-fluorocytidine-3'-phosphate
  modified_base 8: mod_base = OTHER; note = 2'-O-methyladenosine-3'-phosphate
  modified_base 9: mod_base = OTHER; note = 2'-deoxy-2'-fluoroguanosine-3'-phosphate
  modified_base 10: mod_base = OTHER; note = 2'-deoxy-2'-fluoroguanosine-3'-phosphate
  modified_base 11: mod_base = OTHER; note = 2'-deoxy-2'-fluoroadenosine-3'-phosphate
  modified_base 12: mod_base = OTHER; note = 2'-O-methyluridine-3'-phosphate
  modified_base 13: mod_base = OTHER; note = 2'-O-methylguanosine-3'-phosphate
  modified_base 14: mod_base = OTHER; note = 2'-O-methyladenosine-3'-phosphate
  modified_base 15: mod_base = OTHER; note = 2'-O-methyluridine-3'-phosphate
  modified_base 16: mod_base = OTHER; note = 2'-O-methylcytidine-3'-phosphate
  modified_base 17: mod_base = OTHER; note = 2'-O-methylcytidine-3'-phosphate
  modified_base 18: mod_base = OTHER; note = 2'-O-methyluridine-3'-phosphate
  modified_base 19: mod_base = OTHER; note = 2'-O-methyladenosine-3'-phosphorothioate
  modified_base 20: mod_base = OTHER; note = 2'-O-methylguanosine-3'-phosphorothioate
  modified_base 21: mod_base = OTHER; note = 2'-O-methyladenosine
tatcgccaggatgatcctaga

SEQ ID NO: 873 - RNA, 21 nt, synthetic construct
  source 1..21: mol_type = other RNA
  modified_base 1: mod_base = OTHER; note = 2'-O-methylcytidine-3'-phosphorothioate
  modified_base 2: mod_base = OTHER; note = 2'-O-methyladenosine-3'-phosphorothioate
  modified_base 3: mod_base = OTHER; note = 2'-O-methylcytidine-3'-phosphate
  modified_base 4: mod_base = OTHER; note = 2'-O-methylcytidine-3'-phosphate
  modified_base 5: mod_base = OTHER; note = 2'-O-methyladenosine-3'-phosphate
  modified_base 6: mod_base = OTHER; note = 2'-O-methylcytidine-3'-phosphate
  modified_base 7: mod_base = OTHER; note = 2'-deoxy-2'-fluorocytidine-3'-phosphate
  modified_base 8: mod_base = OTHER; note = 2'-O-methylcytidine-3'-phosphate
  modified_base 9: mod_base = OTHER; note = 2'-deoxy-2'-fluorouridine-3'-phosphate
  modified_base 10: mod_base = OTHER; note = 2'-deoxy-2'-fluoroguanosine-3'-phosphate
  modified_base 11: mod_base = OTHER; note = 2'-deoxy-2'-fluoroguanosine-3'-phosphate
  modified_base 12: mod_base = OTHER; note = 2'-O-methyluridine-3'-phosphate
  modified_base 13: mod_base = OTHER; note = 2'-O-methylguanosine-3'-phosphate
  modified_base 14: mod_base = OTHER; note = 2'-O-methylcytidine-3'-phosphate
  modified_base 15: mod_base = OTHER; note = 2'-O-methyluridine-3'-phosphate
  modified_base 16: mod_base = OTHER; note = 2'-O-methylguanosine-3'-phosphate
  modified_base 17: mod_base = OTHER; note = 2'-O-methyladenosine-3'-phosphate
  modified_base 18: mod_base = OTHER; note = 2'-O-methylcytidine-3'-phosphate
  modified_base 19: mod_base = OTHER; note = 2'-O-methyluridine-3'-phosphorothioate
  modified_base 20: mod_base = OTHER; note = 2'-O-methyladenosine-3'-phosphorothioate
  modified_base 21: mod_base = OTHER; note = 2'-O-methyladenosine
caccaccctggtgctgactaa

SEQ ID NO: 874 - RNA, 21 nt, synthetic construct
  source 1..21: mol_type = other RNA
  modified_base 1: mod_base = OTHER; note = 2'-O-methyladenosine-3'-phosphorothioate
  modified_base 2: mod_base = OTHER; note = 2'-O-methyluridine-3'-phosphorothioate
  modified_base 3: mod_base = OTHER; note = 2'-O-methylcytidine-3'-phosphate
  modified_base 4: mod_base = OTHER; note = 2'-O-methyladenosine-3'-phosphate
  modified_base 5: mod_base = OTHER; note = 2'-O-methylguanosine-3'-phosphate
  modified_base 6: mod_base = OTHER; note = 2'-O-methylcytidine-3'-phosphate
  modified_base 7: mod_base = OTHER; note = 2'-O-methyluridine-3'-phosphate
  modified_base 8: mod_base = OTHER; note = 2'-O-methylguanosine-3'-phosphate
  modified_base 9: mod_base = OTHER; note = 2'-deoxy-2'-fluoroguanosine-3'-phosphate
  modified_base 10: mod_base = OTHER; note = 2'-deoxy-2'-fluorocytidine-3'-phosphate
  modified_base 11: mod_base = OTHER; note = 2'-deoxy-2'-fluorocytidine-3'-phosphate
  modified_base 12: mod_base = OTHER; note = 2'-O-methyluridine-3'-phosphate
  modified_base 13: mod_base = OTHER; note = 2'-O-methylguanosine-3'-phosphate
  modified_base 14: mod_base = OTHER; note = 2'-O-methylguanosine-3'-phosphate
  modified_base 15: mod_base = OTHER; note = 2'-O-methyluridine-3'-phosphate
  modified_base 16: mod_base = OTHER; note = 2'-O-methyluridine-3'-phosphate
  modified_base 17: mod_base = OTHER; note = 2'-O-methyluridine-3'-phosphate
  modified_base 18: mod_base = OTHER; note = 2'-O-methylguanosine-3'-phosphate
  modified_base 19: mod_base = OTHER; note = 2'-O-methyladenosine-3'-phosphorothioate
  modified_base 20: mod_base = OTHER; note = 2'-O-methyluridine-3'-phosphorothioate
  modified_base 21: mod_base = OTHER; note = 2'-O-methyladenosine
atcagctggcctggtttgata

SEQ ID NO: 875 - RNA, 21 nt, synthetic construct
  source 1..21: mol_type = other RNA
  modified_base 1: mod_base = OTHER; note = 2'-O-methyluridine-3'-phosphorothioate
  modified_base 2: mod_base = OTHER; note = 2'-O-methylcytidine-3'-phosphorothioate
  modified_base 3: mod_base = OTHER; note = 2'-O-methyladenosine-3'-phosphate
  modified_base 4: mod_base = OTHER; note = 2'-O-methylguanosine-3'-phosphate
  modified_base 5: mod_base = OTHER; note = 2'-O-methylcytidine-3'-phosphate
  modified_base 6: mod_base = OTHER; note = 2'-O-methyluridine-3'-phosphate
  modified_base 7: mod_base = OTHER; note = 2'-deoxy-2'-fluoroguanosine-3'-phosphate
  modified_base 8: mod_base = OTHER; note = 2'-O-methylguanosine-3'-phosphate
  modified_base 9: mod_base = OTHER; note = 2'-deoxy-2'-fluorocytidine-3'-phosphate
  modified_base 10: mod_base = OTHER; note = 2'-deoxy-2'-fluorocytidine-3'-phosphate
  modified_base 11: mod_base = OTHER; note = 2'-deoxy-2'-fluorouridine-3'-phosphate
  modified_base 12: mod_base = OTHER; note = 2'-O-methylguanosine-3'-phosphate
  modified_base 13: mod_base = OTHER; note = 2'-O-methylguanosine-3'-phosphate
  modified_base 14: mod_base = OTHER; note = 2'-O-methyluridine-3'-phosphate
  modified_base 15: mod_base = OTHER; note = 2'-O-methyluridine-3'-phosphate
  modified_base 16: mod_base = OTHER; note = 2'-O-methyluridine-3'-phosphate
  modified_base 17: mod_base = OTHER; note = 2'-O-methylguanosine-3'-phosphate
  modified_base 18: mod_base = OTHER; note = 2'-O-methyladenosine-3'-phosphate
  modified_base 19: mod_base = OTHER; note = 2'-O-methyluridine-3'-phosphorothioate
  modified_base 20: mod_base = OTHER; note = 2'-O-methyladenosine-3'-phosphorothioate
  modified_base 21: mod_base = OTHER; note = 2'-O-methyladenosine
tcagctggcctggtttgataa

SEQ ID NO: 876 - RNA, 21 nt, synthetic construct
  source 1..21: mol_type = other RNA
  modified_base 1: mod_base = OTHER; note = 2'-O-methyluridine-3'-phosphorothioate
  modified_base 2: mod_base = OTHER; note = 2'-O-methylcytidine-3'-phosphorothioate
  modified_base 3: mod_base = OTHER; note = 2'-O-methyladenosine-3'-phosphate
  modified_base 4: mod_base = OTHER; note = 2'-O-methylguanosine-3'-phosphate
  modified_base 5: mod_base = OTHER; note = 2'-O-methylcytidine-3'-phosphate
  modified_base 6: mod_base = OTHER; note = 2'-O-methyluridine-3'-phosphate
  modified_base 7: mod_base = OTHER; note = 2'-O-methylguanosine-3'-phosphate
  modified_base 8: mod_base = OTHER; note = 2'-O-methylguanosine-3'-phosphate
  modified_base 9: mod_base = OTHER; note = 2'-deoxy-2'-fluorocytidine-3'-phosphate
  modified_base 10: mod_base = OTHER; note = 2'-deoxy-2'-fluorocytidine-3'-phosphate
  modified_base 11: mod_base = OTHER; note = 2'-deoxy-2'-fluorouridine-3'-phosphate
  modified_base 12: mod_base = OTHER; note = 2'-O-methylguanosine-3'-phosphate
  modified_base 13: mod_base = OTHER; note = 2'-O-methylguanosine-3'-phosphate
  modified_base 14: mod_base = OTHER; note = 2'-O-methyluridine-3'-phosphate
  modified_base 15: mod_base = OTHER; note = 2'-O-methyluridine-3'-phosphate
  modified_base 16: mod_base = OTHER; note = 2'-O-methyluridine-3'-phosphate
  modified_base 17: mod_base = OTHER; note = 2'-O-methylguanosine-3'-phosphate
  modified_base 18: mod_base = OTHER; note = 2'-O-methyladenosine-3'-phosphate
  modified_base 19: mod_base = OTHER; note = 2'-O-methyluridine-3'-phosphorothioate
  modified_base 20: mod_base = OTHER; note = 2'-O-methyladenosine-3'-phosphorothioate
  modified_base 21: mod_base = OTHER; note = 2'-O-methyladenosine
tcagctggcctggtttgataa

SEQ ID NO: 877 - RNA, 21 nt, synthetic construct
  source 1..21: mol_type = other RNA
  modified_base 1: mod_base = OTHER; note = 2'-O-methylcytidine-3'-phosphorothioate
  modified_base 2: mod_base = OTHER; note = 2'-O-methyluridine-3'-phosphorothioate
  modified_base 3: mod_base = OTHER; note = 2'-O-methylguanosine-3'-phosphate
  modified_base 4: mod_base = OTHER; note = 2'-O-methylguanosine-3'-phosphate
  modified_base 5: mod_base = OTHER; note = 2'-O-methylcytidine-3'-phosphate
  modified_base 6: mod_base = OTHER; note = 2'-O-methylcytidine-3'-phosphate
  modified_base 7: mod_base = OTHER; note = 2'-deoxy-2'-fluorouridine-3'-phosphate
  modified_base 8: mod_base = OTHER; note = 2'-O-methylguanosine-3'-phosphate
  modified_base 9: mod_base = OTHER; note = 2'-deoxy-2'-fluoroguanosine-3'-phosphate
  modified_base 10: mod_base = OTHER; note = 2'-deoxy-2'-fluorouridine-3'-phosphate
  modified_base 11: mod_base = OTHER; note = 2'-deoxy-2'-fluorouridine-3'-phosphate
  modified_base 12: mod_base = OTHER; note = 2'-O-methyluridine-3'-phosphate
  modified_base 13: mod_base = OTHER; note = 2'-O-methylguanosine-3'-phosphate
  modified_base 14: mod_base = OTHER; note = 2'-O-methyladenosine-3'-phosphate
  modified_base 15: mod_base = OTHER; note = 2'-O-methyluridine-3'-phosphate
  modified_base 16: mod_base = OTHER; note = 2'-O-methyladenosine-3'-phosphate
  modified_base 17: mod_base = OTHER; note = 2'-O-methylcytidine-3'-phosphate
  modified_base 18: mod_base = OTHER; note = 2'-O-methyluridine-3'-phosphate
  modified_base 19: mod_base = OTHER; note = 2'-O-methylguanosine-3'-phosphorothioate
  modified_base 20: mod_base = OTHER; note = 2'-O-methyladenosine-3'-phosphorothioate
  modified_base 21: mod_base = OTHER; note = 2'-O-methyladenosine
ctggcctggtttgatactgaa

SEQ ID NO: 878 - RNA, 21 nt, synthetic construct
  source 1..21: mol_type = other RNA
  modified_base 1: mod_base = OTHER; note = 2'-O-methylcytidine-3'-phosphorothioate
  modified_base 2: mod_base = OTHER; note = 2'-O-methyluridine-3'-phosphorothioate
  modified_base 3: mod_base = OTHER; note = 2'-O-methylguanosine-3'-phosphate
  modified_base 4: mod_base = OTHER; note = 2'-O-methyluridine-3'-phosphate
  modified_base 5: mod_base = OTHER; note = 2'-O-methyladenosine-3'-phosphate
  modified_base 6: mod_base = OTHER; note = 2'-O-methyladenosine-3'-phosphate
  modified_base 7: mod_base = OTHER; note = 2'-O-methyladenosine-3'-phosphate
  modified_base 8: mod_base = OTHER; note = 2'-O-methyluridine-3'-phosphate
  modified_base 9: mod_base = OTHER; note = 2'-deoxy-2'-fluorocytidine-3'-phosphate
  modified_base 10: mod_base = OTHER; note = 2'-deoxy-2'-fluoroadenosine-3'-phosphate
  modified_base 11: mod_base = OTHER; note = 2'-deoxy-2'-fluorouridine-3'-phosphate
  modified_base 12: mod_base = OTHER; note = 2'-O-methylcytidine-3'-phosphate
  modified_base 13: mod_base = OTHER; note = 2'-O-methylcytidine-3'-phosphate
  modified_base 14: mod_base = OTHER; note = 2'-O-methyluridine-3'-phosphate
  modified_base 15: mod_base = OTHER; note = 2'-O-methyluridine-3'-phosphate
  modified_base 16: mod_base = OTHER; note = 2'-O-methyluridine-3'-phosphate
  modified_base 17: mod_base = OTHER; note = 2'-O-methyladenosine-3'-phosphate
  modified_base 18: mod_base = OTHER; note = 2'-O-methylguanosine-3'-phosphate
  modified_base 19: mod_base = OTHER; note = 2'-O-methylguanosine-3'-phosphorothioate
  modified_base 20: mod_base = OTHER; note = 2'-O-methyluridine-3'-phosphorothioate
  modified_base 21: mod_base = OTHER; note = 2'-O-methyladenosine
ctgtaaatcatcctttaggta

SEQ ID NO: 879 - RNA, 21 nt, synthetic construct
  source 1..21: mol_type = other RNA
  modified_base 1: mod_base = OTHER; note = 2'-O-methyluridine-3'-phosphorothioate
  modified_base 2: mod_base = OTHER; note = 2'-O-methylguanosine-3'-phosphorothioate
  modified_base 3: mod_base = OTHER; note = 2'-O-methyluridine-3'-phosphate
  modified_base 4: mod_base = OTHER; note = 2'-O-methyladenosine-3'-phosphate
  modified_base 5: mod_base = OTHER; note = 2'-O-methyladenosine-3'-phosphate
  modified_base 6: mod_base = OTHER; note = 2'-O-methyladenosine-3'-phosphate
  modified_base 7: mod_base = OTHER; note = 2'-O-methyluridine-3'-phosphate
  modified_base 8: mod_base = OTHER; note = 2'-O-methylcytidine-3'-phosphate
  modified_base 9: mod_base = OTHER; note = 2'-deoxy-2'-fluoroadenosine-3'-phosphate
  modified_base 10: mod_base = OTHER; note = 2'-deoxy-2'-fluorouridine-3'-phosphate
  modified_base 11: mod_base = OTHER; note = 2'-deoxy-2'-fluorocytidine-3'-phosphate
  modified_base 12: mod_base = OTHER; note = 2'-O-methylcytidine-3'-phosphate
  modified_base 13: mod_base = OTHER; note = 2'-O-methyluridine-3'-phosphate
  modified_base 14: mod_base = OTHER; note = 2'-O-methyluridine-3'-phosphate
  modified_base 15: mod_base = OTHER; note = 2'-O-methyluridine-3'-phosphate
  modified_base 16: mod_base = OTHER; note = 2'-O-methyladenosine-3'-phosphate
  modified_base 17: mod_base = OTHER; note = 2'-O-methylguanosine-3'-phosphate
  modified_base 18: mod_base = OTHER; note = 2'-O-methylguanosine-3'-phosphate
  modified_base 19: mod_base = OTHER; note = 2'-O-methyluridine-3'-phosphorothioate
  modified_base 20: mod_base = OTHER; note = 2'-O-methyladenosine-3'-phosphorothioate
  modified_base 21: mod_base = OTHER; note = 2'-O-methyladenosine
tgtaaatcatcctttaggtaa

SEQ ID NO: 880 - RNA, 21 nt, synthetic construct
  source 1..21: mol_type = other RNA
  modified_base 1: mod_base = OTHER; note = 2'-O-methyladenosine-3'-phosphorothioate
  modified_base 2: mod_base = OTHER; note = 2'-O-methyladenosine-3'-phosphorothioate
  modified_base 3: mod_base = OTHER; note = 2'-O-methyladenosine-3'-phosphate
  modified_base 4: mod_base = OTHER; note = 2'-O-methylguanosine-3'-phosphate
  modified_base 5: mod_base = OTHER; note = 2'-O-methyladenosine-3'-phosphate
  modified_base 6: mod_base = OTHER; note = 2'-O-methylcytidine-3'-phosphate
  modified_base 7: mod_base = OTHER; note = 2'-O-methyluridine-3'-phosphate
  modified_base 8: mod_base = OTHER; note = 2'-O-methyluridine-3'-phosphate
  modified_base 9: mod_base = OTHER; note = 2'-deoxy-2'-fluoroguanosine-3'-phosphate
  modified_base 10: mod_base = OTHER; note = 2'-deoxy-2'-fluoroguanosine-3'-phosphate
  modified_base 11: mod_base = OTHER; note = 2'-deoxy-2'-fluorouridine-3'-phosphate
  modified_base 12: mod_base = OTHER; note = 2'-O-methyluridine-3'-phosphate
  modified_base 13: mod_base = OTHER; note = 2'-O-methylguanosine-3'-phosphate
  modified_base 14: mod_base = OTHER; note = 2'-O-methylguanosine-3'-phosphate
  modified_base 15: mod_base = OTHER; note = 2'-O-methyluridine-3'-phosphate
  modified_base 16: mod_base = OTHER; note = 2'-O-methyladenosine-3'-phosphate
  modified_base 17: mod_base = OTHER; note = 2'-O-methylguanosine-3'-phosphate
  modified_base 18: mod_base = OTHER; note = 2'-O-methylguanosine-3'-phosphate
  modified_base 19: mod_base = OTHER; note = 2'-O-methylguanosine-3'-phosphorothioate
  modified_base 20: mod_base = OTHER; note = 2'-O-methyluridine-3'-phosphorothioate
  modified_base 21: mod_base = OTHER; note = 2'-O-methyladenosine
aaagacttggttggtagggta

SEQ ID NO: 881 - RNA, 21 nt, synthetic construct
  source 1..21: mol_type = other RNA
  modified_base 1: mod_base = OTHER; note = 2'-O-methyladenosine-3'-phosphorothioate
  modified_base 2: mod_base = OTHER; note = 2'-O-methylcytidine-3'-phosphorothioate
  modified_base 3: mod_base = OTHER; note = 2'-O-methyluridine-3'-phosphate
  modified_base 4: mod_base = OTHER; note = 2'-O-methyluridine-3'-phosphate
  modified_base 5: mod_base = OTHER; note = 2'-O-methyluridine-3'-phosphate
  modified_base 6: mod_base = OTHER; note = 2'-O-methylguanosine-3'-phosphate
  modified_base 7: mod_base = OTHER; note = 2'-deoxy-2'-fluoroadenosine-3'-phosphate
  modified_base 8: mod_base = OTHER; note = 2'-O-methyladenosine-3'-phosphate
  modified_base 9: mod_base = OTHER; note = 2'-deoxy-2'-fluoroadenosine-3'-phosphate
  modified_base 10: mod_base = OTHER; note = 2'-deoxy-2'-fluoroguanosine-3'-phosphate
  modified_base 11: mod_base = OTHER; note = 2'-deoxy-2'-fluoroguanosine-3'-phosphate
  modified_base 12: mod_base = OTHER; note = 2'-O-methyladenosine-3'-phosphate
  modified_base 13: mod_base = OTHER; note = 2'-O-methylguanosine-3'-phosphate
  modified_base 14: mod_base = OTHER; note = 2'-O-methyladenosine-3'-phosphate
  modified_base 15: mod_base = OTHER; note = 2'-O-methyluridine-3'-phosphate
  modified_base 16: mod_base = OTHER; note = 2'-O-methylguanosine-3'-phosphate
  modified_base 17: mod_base = OTHER; note = 2'-O-methyluridine-3'-phosphate
  modified_base 18: mod_base = OTHER; note = 2'-O-methylcytidine-3'-phosphate
  modified_base 19: mod_base = OTHER; note = 2'-O-methyluridine-3'-phosphorothioate
  modified_base 20: mod_base = OTHER; note = 2'-O-methyluridine-3'-phosphorothioate
  modified_base 21: mod_base = OTHER; note = 2'-O-methyladenosine
actttgaaaggagatgtctta

SEQ ID NO: 882 - RNA, 21 nt, synthetic construct
  source 1..21: mol_type = other RNA
  modified_base 1: mod_base = OTHER; note = 2'-O-methyladenosine-3'-phosphorothioate
  modified_base 2: mod_base = OTHER; note = 2'-O-methylcytidine-3'-phosphorothioate
  modified_base 3: mod_base = OTHER; note = 2'-O-methyluridine-3'-phosphate
  modified_base 4: mod_base = OTHER; note = 2'-O-methyluridine-3'-phosphate
  modified_base 5: mod_base = OTHER; note = 2'-O-methyluridine-3'-phosphate
  modified_base 6: mod_base = OTHER; note = 2'-O-methylguanosine-3'-phosphate
  modified_base 7: mod_base = OTHER; note = 2'-O-methyladenosine-3'-phosphate
  modified_base 8: mod_base = OTHER; note = 2'-O-methyladenosine-3'-phosphate
  modified_base 9: mod_base = OTHER; note = 2'-deoxy-2'-fluoroadenosine-3'-phosphate
  modified_base 10: mod_base = OTHER; note = 2'-deoxy-2'-fluoroguanosine-3'-phosphate
  modified_base 11: mod_base = OTHER; note = 2'-deoxy-2'-fluoroguanosine-3'-phosphate
  modified_base 12: mod_base = OTHER; note = 2'-O-methyladenosine-3'-phosphate
  modified_base 13: mod_base = OTHER; note = 2'-O-methylguanosine-3'-phosphate
  modified_base 14: mod_base = OTHER; note = 2'-O-methyladenosine-3'-phosphate
  modified_base 15: mod_base = OTHER; note = 2'-O-methyluridine-3'-phosphate
  modified_base 16: mod_base = OTHER; note = 2'-O-methylguanosine-3'-phosphate
  modified_base 17: mod_base = OTHER; note = 2'-O-methyluridine-3'-phosphate
  modified_base 18: mod_base = OTHER; note = 2'-O-methylcytidine-3'-phosphate
  modified_base 19: mod_base = OTHER; note = 2'-O-methyluridine-3'-phosphorothioate
  modified_base 20: mod_base = OTHER; note = 2'-O-methyluridine-3'-phosphorothioate
  modified_base 21: mod_base = OTHER; note = 2'-O-methyladenosine
actttgaaaggagatgtctta

SEQ ID NO: 883 - RNA, 21 nt, synthetic construct
  source 1..21: mol_type = other RNA
  modified_base 1: mod_base = OTHER; note = 2'-O-methyluridine-3'-phosphorothioate
  modified_base 2: mod_base = OTHER; note = 2'-O-methyluridine-3'-phosphorothioate
  modified_base 3: mod_base = OTHER; note = 2'-O-methylcytidine-3'-phosphate
  modified_base 4: mod_base = OTHER; note = 2'-O-methyluridine-3'-phosphate
  modified_base 5: mod_base = OTHER; note = 2'-O-methylcytidine-3'-phosphate
  modified_base 6: mod_base = OTHER; note = 2'-O-methyladenosine-3'-phosphate
  modified_base 7: mod_base = OTHER; note = 2'-O-methylguanosine-3'-phosphate
  modified_base 8: mod_base = OTHER; note = 2'-O-methyladenosine-3'-phosphate
  modified_base 9: mod_base = OTHER; note = 2'-deoxy-2'-fluorouridine-3'-phosphate
  modified_base 10: mod_base = OTHER; note = 2'-deoxy-2'-fluorouridine-3'-phosphate
  modified_base 11: mod_base = OTHER; note = 2'-deoxy-2'-fluorouridine-3'-phosphate
  modified_base 12: mod_base = OTHER; note = 2'-O-methylcytidine-3'-phosphate
  modified_base 13: mod_base = OTHER; note = 2'-O-methyluridine-3'-phosphate
  modified_base 14: mod_base = OTHER; note = 2'-O-methylguanosine-3'-phosphate
  modified_base 15: mod_base = OTHER; note = 2'-O-methylguanosine-3'-phosphate
  modified_base 16: mod_base = OTHER; note = 2'-O-methyluridine-3'-phosphate
  modified_base 17: mod_base = OTHER; note = 2'-O-methyluridine-3'-phosphate
  modified_base 18: mod_base = OTHER; note = 2'-O-methylguanosine-3'-phosphate
  modified_base 19: mod_base = OTHER; note = 2'-O-methyluridine-3'-phosphorothioate
  modified_base 20: mod_base = OTHER; note = 2'-O-methyluridine-3'-phosphorothioate
  modified_base 21: mod_base = OTHER; note = 2'-O-methyladenosine
ttctcagatttctggttgtta

SEQ ID NO: 884 - RNA, 21 nt, synthetic construct
  source 1..21: mol_type = other RNA
  modified_base 1: mod_base = OTHER; note = 2'-O-methyluridine-3'-phosphorothioate
  modified_base 2: mod_base = OTHER; note = 2'-O-methylcytidine-3'-phosphorothioate
  modified_base 3: mod_base = OTHER; note = 2'-O-methyluridine-3'-phosphate
  modified_base 4: mod_base = OTHER; note = 2'-O-methylcytidine-3'-phosphate
  modified_base 5: mod_base = OTHER; note = 2'-O-methyladenosine-3'-phosphate
  modified_base 6: mod_base = OTHER; note = 2'-O-methylguanosine-3'-phosphate
  modified_base 7: mod_base = OTHER; note = 2'-deoxy-2'-fluoroadenosine-3'-phosphate
  modified_base 8: mod_base = OTHER; note = 2'-O-methyluridine-3'-phosphate
  modified_base 9: mod_base = OTHER; note = 2'-deoxy-2'-fluorouridine-3'-phosphate
  modified_base 10: mod_base = OTHER; note = 2'-deoxy-2'-fluorouridine-3'-phosphate
  modified_base 11: mod_base = OTHER; note = 2'-deoxy-2'-fluorocytidine-3'-phosphate
  modified_base 12: mod_base = OTHER; note = 2'-O-methyluridine-3'-phosphate
  modified_base 13: mod_base = OTHER; note = 2'-O-methylguanosine-3'-phosphate
  modified_base 14: mod_base = OTHER; note = 2'-O-methylguanosine-3'-phosphate
  modified_base 15: mod_base = OTHER; note = 2'-O-methyluridine-3'-phosphate
  modified_base 16: mod_base = OTHER; note = 2'-O-methyluridine-3'-phosphate
  modified_base 17: mod_base = OTHER; note = 2'-O-methylguanosine-3'-phosphate
  modified_base 18: mod_base = OTHER; note = 2'-O-methyluridine-3'-phosphate
  modified_base 19: mod_base = OTHER; note = 2'-O-methyluridine-3'-phosphorothioate
  modified_base 20: mod_base = OTHER; note = 2'-O-methyladenosine-3'-phosphorothioate
  modified_base 21: mod_base = OTHER; note = 2'-O-methyladenosine
tctcagatttctggttgttaa

SEQ ID NO: 885 - RNA, 21 nt, synthetic construct
  source 1..21: mol_type = other RNA
  modified_base 1: mod_base = OTHER; note = 2'-O-methyluridine-3'-phosphorothioate
  modified_base 2: mod_base = OTHER; note = 2'-O-methylcytidine-3'-phosphorothioate
  modified_base 3: mod_base = OTHER; note = 2'-O-methyluridine-3'-phosphate
  modified_base 4: mod_base = OTHER; note = 2'-O-methylcytidine-3'-phosphate
  modified_base 5: mod_base = OTHER; note = 2'-O-methyladenosine-3'-phosphate
  modified_base 6: mod_base = OTHER; note = 2'-O-methylguanosine-3'-phosphate
  modified_base 7: mod_base = OTHER; note = 2'-O-methyladenosine-3'-phosphate
  modified_base 8: mod_base = OTHER; note = 2'-O-methyluridine-3'-phosphate
  modified_base 9: mod_base = OTHER; note = 2'-deoxy-2'-fluorouridine-3'-phosphate
  modified_base 10: mod_base = OTHER; note = 2'-deoxy-2'-fluorouridine-3'-phosphate
  modified_base 11: mod_base = OTHER; note = 2'-deoxy-2'-fluorocytidine-3'-phosphate
  modified_base 12: mod_base = OTHER; note = 2'-O-methyluridine-3'-phosphate
  modified_base 13: mod_base = OTHER; note = 2'-O-methylguanosine-3'-phosphate
  modified_base 14: mod_base = OTHER; note = 2'-O-methylguanosine-3'-phosphate
  modified_base 15: mod_base = OTHER; note = 2'-O-methyluridine-3'-phosphate
  modified_base 16: mod_base = OTHER; note = 2'-O-methyluridine-3'-phosphate
  modified_base 17: mod_base = OTHER; note = 2'-O-methylguanosine-3'-phosphate
  modified_base 18: mod_base = OTHER; note = 2'-O-methyluridine-3'-phosphate
  modified_base 19: mod_base = OTHER; note = 2'-O-methyluridine-3'-phosphorothioate
  modified_base 20: mod_base = OTHER; note = 2'-O-methyladenosine-3'-phosphorothioate
  modified_base 21: mod_base = OTHER; note = 2'-O-methyladenosine
tctcagatttctggttgttaa

SEQ ID NO: 886 - RNA, 21 nt, synthetic construct
  source 1..21: mol_type = other RNA
  modified_base 1: mod_base = OTHER; note = 2'-O-methylcytidine-3'-phosphorothioate
  modified_base 2: mod_base = OTHER; note = 2'-O-methyluridine-3'-phosphorothioate
  modified_base 3: mod_base = OTHER; note = 2'-O-methylcytidine-3'-phosphate
  modified_base 4: mod_base = OTHER; note = 2'-O-methyladenosine-3'-phosphate
  modified_base 5: mod_base = OTHER; note = 2'-O-methylguanosine-3'-phosphate
  modified_base 6: mod_base = OTHER; note = 2'-O-methyladenosine-3'-phosphate
  modified_base 7: mod_base = OTHER; note = 2'-O-methyluridine-3'-phosphate
  modified_base 8: mod_base = OTHER; note = 2'-O-methyluridine-3'-phosphate
  modified_base 9: mod_base = OTHER; note = 2'-deoxy-2'-fluorouridine-3'-phosphate
  modified_base 10: mod_base = OTHER; note = 2'-deoxy-2'-fluorocytidine-3'-phosphate
  modified_base 11: mod_base = OTHER; note = 2'-deoxy-2'-fluorouridine-3'-phosphate
  modified_base 12: mod_base = OTHER; note = 2'-O-methylguanosine-3'-phosphate
  modified_base 13: mod_base = OTHER; note = 2'-O-methylguanosine-3'-phosphate
  modified_base 14: mod_base = OTHER; note = 2'-O-methyluridine-3'-phosphate
  modified_base 15: mod_base = OTHER; note = 2'-O-methyluridine-3'-phosphate
  modified_base 16: mod_base = OTHER; note = 2'-O-methylguanosine-3'-phosphate
  modified_base 17: mod_base = OTHER; note = 2'-O-methyluridine-3'-phosphate
  modified_base 18: mod_base = OTHER; note = 2'-O-methyluridine-3'-phosphate
  modified_base 19: mod_base = OTHER; note = 2'-O-methyladenosine-3'-phosphorothioate
  modified_base 20: mod_base = OTHER; note = 2'-O-methyluridine-3'-phosphorothioate
  modified_base 21: mod_base = OTHER; note = 2'-O-methyladenosine
ctcagatttctggttgttata

SEQ ID NO: 887 - RNA, 21 nt, synthetic construct
  source 1..21: mol_type = other RNA
  modified_base 1: mod_base = OTHER; note = 2'-O-methylguanosine-3'-phosphorothioate
  modified_base 2: mod_base = OTHER; note = 2'-O-methyluridine-3'-phosphorothioate
  modified_base 3: mod_base = OTHER; note = 2'-O-methyluridine-3'-phosphate
  modified_base 4: mod_base = OTHER; note = 2'-O-methylguanosine-3'-phosphate
  modified_base 5: mod_base = OTHER; note = 2'-O-methyluridine-3'-phosphate
  modified_base 6: mod_base = OTHER; note = 2'-O-methyluridine-3'-phosphate
  modified_base 7: mod_base = OTHER; note = 2'-O-methyladenosine-3'-phosphate
  modified_base 8: mod_base = OTHER; note = 2'-O-methyluridine-3'-phosphate
  modified_base 9: mod_base = OTHER; note = 2'-deoxy-2'-fluoroguanosine-3'-phosphate
  modified_base 10: mod_base = OTHER; note = 2'-deoxy-2'-fluorouridine-3'-phosphate
  modified_base 11: mod_base = OTHER; note = 2'-deoxy-2'-fluoroguanosine-3'-phosphate
  modified_base 12: mod_base = OTHER; note = 2'-O-methyladenosine-3'-phosphate
  modified_base 13: mod_base = OTHER; note = 2'-O-methyluridine-3'-phosphate
  modified_base 14: mod_base = OTHER; note = 2'-O-methylcytidine-3'-phosphate
  modified_base 15: mod_base = OTHER; note = 2'-O-methyladenosine-3'-phosphate
  modified_base 16: mod_base = OTHER; note = 2'-O-methyluridine-3'-phosphate
  modified_base 17: mod_base = OTHER; note = 2'-O-methylguanosine-3'-phosphate
  modified_base 18: mod_base = OTHER; note = 2'-O-methyluridine-3'-phosphate
  modified_base 19: mod_base = OTHER; note = 2'-O-methylguanosine-3'-phosphorothioate
  modified_base 20: mod_base = OTHER; note = 2'-O-methyluridine-3'-phosphorothioate
  modified_base 21: mod_base = OTHER; note = 2'-O-methyladenosine
gttgttatgtgatcatgtgta

SEQ ID NO: 888 - RNA, 21 nt, synthetic construct
  source 1..21: mol_type = other RNA
  modified_base 1: mod_base = OTHER; note = 2'-O-methyluridine-3'-phosphorothioate
  modified_base 2: mod_base = OTHER; note = 2'-O-methyluridine-3'-phosphorothioate
  modified_base 3: mod_base = OTHER; note = 2'-O-methylguanosine-3'-phosphate
  modified_base 4: mod_base = OTHER; note = 2'-O-methyluridine-3'-phosphate
  modified_base 5: mod_base = OTHER; note = 2'-O-methyluridine-3'-phosphate
  modified_base 6: mod_base = OTHER; note = 2'-O-methyladenosine-3'-phosphate
  modified_base 7: mod_base = OTHER; note = 2'-O-methyluridine-3'-phosphate
  modified_base 8: mod_base = OTHER; note = 2'-O-methylguanosine-3'-phosphate
  modified_base 9: mod_base = OTHER; note = 2'-deoxy-2'-fluorouridine-3'-phosphate
  modified_base 10: mod_base = OTHER; note = 2'-deoxy-2'-fluoroguanosine-3'-phosphate
  modified_base 11: mod_base = OTHER; note = 2'-deoxy-2'-fluoroadenosine-3'-phosphate
  modified_base 12: mod_base = OTHER; note = 2'-O-methyluridine-3'-phosphate
  modified_base 13: mod_base = OTHER; note = 2'-O-methylcytidine-3'-phosphate
  modified_base 14: mod_base = OTHER; note = 2'-O-methyladenosine-3'-phosphate
  modified_base 15: mod_base = OTHER; note = 2'-O-methyluridine-3'-phosphate
  modified_base 16: mod_base = OTHER; note = 2'-O-methylguanosine-3'-phosphate
  modified_base 17: mod_base = OTHER; note = 2'-O-methyluridine-3'-phosphate
  modified_base 18: mod_base = OTHER; note = 2'-O-methylguanosine-3'-phosphate
  modified_base 19: mod_base = OTHER; note = 2'-O-methyluridine-3'-phosphorothioate
  modified_base 20: mod_base = OTHER; note = 2'-O-methylguanosine-3'-phosphorothioate
  modified_base 21: mod_base = OTHER; note = 2'-O-methyladenosine
ttgttatgtgatcatgtgtga

SEQ ID NO: 889 - RNA, 21 nt, synthetic construct
  source 1..21: mol_type = other RNA
  modified_base 1: mod_base = OTHER; note = 2'-O-methylguanosine-3'-phosphorothioate
  modified_base 2: mod_base = OTHER; note = 2'-O-methyluridine-3'-phosphorothioate
  modified_base 3: mod_base = OTHER; note = 2'-O-methylguanosine-3'-phosphate
  modified_base 4: mod_base = OTHER; note = 2'-O-methyladenosine-3'-phosphate
  modified_base 5: mod_base = OTHER; note = 2'-O-methyluridine-3'-phosphate
  modified_base 6: mod_base = OTHER; note = 2'-O-methylcytidine-3'-phosphate
  modified_base 7: mod_base = OTHER; note = 2'-deoxy-2'-fluoroadenosine-3'-phosphate
  modified_base 8: mod_base = OTHER; note = 2'-O-methyluridine-3'-phosphate
  modified_base 9: mod_base = OTHER; note = 2'-deoxy-2'-fluoroguanosine-3'-phosphate
  modified_base 10: mod_base = OTHER; note = 2'-deoxy-2'-fluorouridine-3'-phosphate
  modified_base 11: mod_base = OTHER; note = 2'-deoxy-2'-fluoroguanosine-3'-phosphate
  modified_base 12: mod_base = OTHER; note = 2'-O-methyluridine-3'-phosphate
  modified_base 13: mod_base = OTHER; note = 2'-O-methylguanosine-3'-phosphate
  modified_base 14: mod_base = OTHER; note = 2'-O-methylguanosine-3'-phosphate
  modified_base 15: mod_base = OTHER; note = 2'-O-methyladenosine-3'-phosphate
  modified_base 16: mod_base = OTHER; note = 2'-O-methyladenosine-3'-phosphate
  modified_base 17: mod_base = OTHER; note = 2'-O-methylguanosine-3'-phosphate
  modified_base 18: mod_base = OTHER; note = 2'-O-methyluridine-3'-phosphate
  modified_base 19: mod_base = OTHER; note = 2'-O-methyluridine-3'-phosphorothioate
  modified_base 20: mod_base = OTHER; note = 2'-O-methyladenosine-3'-phosphorothioate
  modified_base 21: mod_base = OTHER; note = 2'-O-methyladenosine
gtgatcatgtgtggaagttaa

SEQ ID NO: 890 - RNA, 21 nt, synthetic construct
  source 1..21: mol_type = other RNA
  modified_base 1: mod_base = OTHER; note = 2'-O-methylguanosine-3'-phosphorothioate
  modified_base 2: mod_base = OTHER; note = 2'-O-methyladenosine-3'-phosphorothioate
  modified_base 3: mod_base = OTHER; note = 2'-O-methyluridine-3'-phosphate
  modified_base 4: mod_base = OTHER; note = 2'-O-methylcytidine-3'-phosphate
  modified_base 5: mod_base = OTHER; note = 2'-O-methyladenosine-3'-phosphate
  modified_base 6: mod_base = OTHER; note = 2'-O-methyluridine-3'-phosphate
  modified_base 7: mod_base = OTHER; note = 2'-O-methylguanosine-3'-phosphate
  modified_base 8: mod_base = OTHER; note = 2'-O-methyluridine-3'-phosphate
  modified_base 9: mod_base = OTHER; note = 2'-deoxy-2'-fluoroguanosine-3'-phosphate
  modified_base 10: mod_base = OTHER; note = 2'-deoxy-2'-fluorouridine-3'-phosphate
  modified_base 11: mod_base = OTHER; note = 2'-deoxy-2'-fluoroguanosine-3'-phosphate
  modified_base 12: mod_base = OTHER; note = 2'-O-methylguanosine-3'-phosphate
  modified_base 13: mod_base = OTHER; note = 2'-O-methyladenosine-3'-phosphate
  modified_base 14: mod_base = OTHER; note = 2'-O-methyladenosine-3'-phosphate
  modified_base 15: mod_base = OTHER; note = 2'-O-methylguanosine-3'-phosphate
  modified_base 16: mod_base = OTHER; note = 2'-O-methyluridine-3'-phosphate
  modified_base 17: mod_base = OTHER; note = 2'-O-methyluridine-3'-phosphate
  modified_base 18: mod_base = OTHER; note = 2'-O-methyladenosine-3'-phosphate
  modified_base 19: mod_base = OTHER; note = 2'-O-methyluridine-3'-phosphorothioate
  modified_base 20: mod_base = OTHER; note = 2'-O-methyluridine-3'-phosphorothioate
  modified_base 21: mod_base = OTHER; note = 2'-O-methyladenosine
gatcatgtgtggaagttatta

SEQ ID NO: 891 - RNA, 21 nt, synthetic construct
  source 1..21: mol_type = other RNA
  modified_base 1: mod_base = OTHER; note = 2'-O-methyladenosine-3'-phosphorothioate
  modified_base 2: mod_base = OTHER; note = 2'-O-methyluridine-3'-phosphorothioate
  modified_base 3: mod_base = OTHER; note = 2'-O-methylcytidine-3'-phosphate
  modified_base 4: mod_base = OTHER; note = 2'-O-methyladenosine-3'-phosphate
  modified_base 5: mod_base = OTHER; note = 2'-O-methyluridine-3'-phosphate
  modified_base 6: mod_base = OTHER; note = 2'-O-methylguanosine-3'-phosphate
  modified_base 7: mod_base = OTHER; note = 2'-O-methyluridine-3'-phosphate
  modified_base 8: mod_base = OTHER; note = 2'-O-methylguanosine-3'-phosphate
  modified_base 9: mod_base = OTHER; note = 2'-deoxy-2'-fluorouridine-3'-phosphate
  modified_base 10: mod_base = OTHER; note = 2'-deoxy-2'-fluoroguanosine-3'-phosphate
  modified_base 11: mod_base = OTHER; note = 2'-deoxy-2'-fluoroguanosine-3'-phosphate
  modified_base 12: mod_base = OTHER; note = 2'-O-methyladenosine-3'-phosphate
  modified_base 13: mod_base = OTHER; note = 2'-O-methyladenosine-3'-phosphate
  modified_base 14: mod_base = OTHER; note = 2'-O-methylguanosine-3'-phosphate
  modified_base 15: mod_base = OTHER; note = 2'-O-methyluridine-3'-phosphate
  modified_base 16: mod_base = OTHER; note = 2'-O-methyluridine-3'-phosphate
  modified_base 17: mod_base = OTHER; note = 2'-O-methyladenosine-3'-phosphate
  modified_base 18: mod_base = OTHER; note = 2'-O-methyluridine-3'-phosphate
  modified_base 19: mod_base = OTHER; note = 2'-O-methyluridine-3'-phosphorothioate
  modified_base 20: mod_base = OTHER; note = 2'-O-methyladenosine-3'-phosphorothioate
  modified_base 21: mod_base = OTHER; note = 2'-O-methyladenosine
atcatgtgtggaagttattaa

SEQ ID NO: 892 - RNA, 21 nt, synthetic construct
  source 1..21: mol_type = other RNA
  modified_base 1: mod_base = OTHER; note = 2'-O-methyluridine-3'-phosphorothioate
  modified_base 2: mod_base = OTHER; note = 2'-O-methylguanosine-3'-phosphorothioate
  modified_base 3: mod_base = OTHER; note = 2'-O-methylcytidine-3'-phosphate
  modified_base 4: mod_base = OTHER; note = 2'-O-methyladenosine-3'-phosphate
  modified_base 5: mod_base = OTHER; note = 2'-O-methyladenosine-3'-phosphate
  modified_base 6: mod_base = OTHER; note = 2'-O-methylcytidine-3'-phosphate
  modified_base 7: mod_base = OTHER; note = 2'-O-methyluridine-3'-phosphate
  modified_base 8: mod_base = OTHER; note = 2'-O-methyluridine-3'-phosphate
  modified_base 9: mod_base = OTHER; note = 2'-deoxy-2'-fluoroadenosine-3'-phosphate
  modified_base 10: mod_base = OTHER; note = 2'-deoxy-2'-fluoroadenosine-3'-phosphate
  modified_base 11: mod_base = OTHER; note = 2'-deoxy-2'-fluorouridine-3'-phosphate
  modified_base 12: mod_base = OTHER; note = 2'-O-methyladenosine-3'-phosphate
  modified_base 13: mod_base = OTHER; note = 2'-O-methylcytidine-3'-phosphate
  modified_base 14: mod_base = OTHER; note = 2'-O-methyluridine-3'-phosphate
  modified_base 15: mod_base = OTHER; note = 2'-O-methylcytidine-3'-phosphate
  modified_base 16: mod_base = OTHER; note = 2'-O-methyladenosine-3'-phosphate
  modified_base 17: mod_base = OTHER; note = 2'-O-methyladenosine-3'-phosphate
  modified_base 18: mod_base = OTHER; note = 2'-O-methyladenosine-3'-phosphate
  modified_base 19: mod_base = OTHER; note = 2'-O-methyluridine-3'-phosphorothioate
  modified_base 20: mod_base = OTHER; note = 2'-O-methylguanosine-3'-phosphorothioate
  modified_base 21: mod_base = OTHER; note = 2'-O-methyladenosine
tgcaacttaatactcaaatga

SEQ ID NO: 893 - RNA, 21 nt, synthetic construct
  source 1..21: mol_type = other RNA
  modified_base 1: mod_base = OTHER; note = 2'-O-methylcytidine-3'-phosphorothioate
  modified_base 2: mod_base = OTHER; note = 2'-O-methylcytidine-3'-phosphorothioate
  modified_base 3: mod_base = OTHER; note = 2'-O-methyluridine-3'-phosphate
  modified_base 4: mod_base = OTHER; note = 2'-O-methyluridine-3'-phosphate
  modified_base 5: mod_base = OTHER; note = 2'-O-methyluridine-3'-phosphate
  modified_base 6: mod_base = OTHER; note = 2'-O-methylcytidine-3'-phosphate
  modified_base 7: mod_base = OTHER; note = 2'-deoxy-2'-fluorouridine-3'-phosphate
  modified_base 8: mod_base = OTHER; note = 2'-O-methylcytidine-3'-phosphate
  modified_base 9: mod_base = OTHER; note = 2'-deoxy-2'-fluorouridine-3'-phosphate
  modified_base 10: mod_base = OTHER; note = 2'-deoxy-2'-fluorocytidine-3'-phosphate
  modified_base 11: mod_base = OTHER; note = 2'-deoxy-2'-fluorouridine-3'-phosphate
  modified_base 12: mod_base = OTHER; note = 2'-O-methyluridine-3'-phosphate
  modified_base 13: mod_base = OTHER; note = 2'-O-methyluridine-3'-phosphate
  modified_base 14: mod_base = OTHER; note = 2'-O-methyladenosine-3'-phosphate
  modified_base 15: mod_base = OTHER; note = 2'-O-methyluridine-3'-phosphate
  modified_base 16: mod_base = OTHER; note = 2'-O-methyladenosine-3'-phosphate
  modified_base 17: mod_base = OTHER; note = 2'-O-methylcytidine-3'-phosphate
  modified_base 18: mod_base = OTHER; note = 2'-O-methyladenosine-3'-phosphate
  modified_base 19: mod_base = OTHER; note = 2'-O-methylguanosine-3'-phosphorothioate
  modified_base 20: mod_base = OTHER; note = 2'-O-methylcytidine-3'-phosphorothioate
  modified_base 21: mod_base = OTHER; note = 2'-O-methyladenosine
cctttctctctttatacagca

SEQ ID NO: 894 - RNA, 21 nt, synthetic construct
  source 1..21: mol_type = other RNA
  modified_base 1: mod_base = OTHER; note = 2'-O-methyluridine-3'-phosphorothioate
  modified_base 2: mod_base = OTHER; note = 2'-O-methyluridine-3'-phosphorothioate
  modified_base 3: mod_base = OTHER; note = 2'-O-methyluridine-3'-phosphate
  modified_base 4: mod_base = OTHER; note = 2'-O-methyladenosine-3'-phosphate
  modified_base 5: mod_base = OTHER; note = 2'-O-methyluridine-3'-phosphate
  modified_base 6: mod_base = OTHER; note = 2'-O-methyladenosine-3'-phosphate
  modified_base 7: mod_base = OTHER; note = 2'-deoxy-2'-fluorocytidine-3'-phosphate
  modified_base 8: mod_base = OTHER; note = 2'-O-methyladenosine-3'-phosphate
  modified_base 9: mod_base = OTHER; note = 2'-deoxy-2'-fluoroguanosine-3'-phosphate
  modified_base 10: mod_base = OTHER; note = 2'-deoxy-2'-fluorocytidine-3'-phosphate
  modified_base 11: mod_base = OTHER; note = 2'-deoxy-2'-fluorouridine-3'-phosphate
  modified_base 12: mod_base = OTHER; note = 2'-O-methylguanosine-3'-phosphate
  modified_base 13: mod_base = OTHER; note = 2'-O-methyluridine-3'-phosphate
  modified_base 14: mod_base = OTHER; note = 2'-O-methyladenosine-3'-phosphate
  modified_base 15: mod_base = OTHER; note = 2'-O-methyluridine-3'-phosphate
  modified_base 16: mod_base = OTHER; note = 2'-O-methyluridine-3'-phosphate
  modified_base 17: mod_base = OTHER; note = 2'-O-methylguanosine-3'-phosphate
  modified_base 18: mod_base = OTHER; note = 2'-O-methyluridine-3'-phosphate
  modified_base 19: mod_base = OTHER; note = 2'-O-methylcytidine-3'-phosphorothioate
  modified_base 20: mod_base = OTHER; note = 2'-O-methyluridine-3'-phosphorothioate
  modified_base 21: mod_base = OTHER; note = 2'-O-methyladenosine
tttatacagctgtattgtcta

SEQ ID NO: 895 - RNA, 21 nt, synthetic construct
  source 1..21: mol_type = other RNA
  modified_base 1: mod_base = OTHER; note = 2'-O-methyluridine-3'-phosphorothioate
  modified_base 2: mod_base = OTHER; note = 2'-O-methyluridine-3'-phosphorothioate
  modified_base 3: mod_base = OTHER; note = 2'-O-methyluridine-3'-phosphate
  modified_base 4: mod_base = OTHER; note = 2'-O-methyladenosine-3'-phosphate
  modified_base 5: mod_base = OTHER; note = 2'-O-methyluridine-3'-phosphate
  modified_base 6: mod_base = OTHER; note = 2'-O-methyladenosine-3'-phosphate
  modified_base 7: mod_base = OTHER; note = 2'-O-methylcytidine-3'-phosphate
  modified_base 8: mod_base = OTHER; note = 2'-O-methyladenosine-3'-phosphate
  modified_base 9: mod_base = OTHER; note = 2'-deoxy-2'-fluoroguanosine-3'-phosphate
  modified_base 10: mod_base = OTHER; note = 2'-deoxy-2'-fluorocytidine-3'-phosphate
  modified_base 11: mod_base = OTHER; note = 2'-deoxy-2'-fluorouridine-3'-phosphate
  modified_base 12: mod_base = OTHER; note = 2'-O-methylguanosine-3'-phosphate
  modified_base 13: mod_base = OTHER; note = 2'-O-methyluridine-3'-phosphate
  modified_base 14: mod_base = OTHER; note = 2'-O-methyladenosine-3'-phosphate
  modified_base 15: mod_base = OTHER; note = 2'-O-methyluridine-3'-phosphate
  modified_base 16: mod_base = OTHER; note = 2'-O-methyluridine-3'-phosphate
  modified_base 17: mod_base = OTHER; note = 2'-O-methylguanosine-3'-phosphate
  modified_base 18: mod_base = OTHER; note = 2'-O-methyluridine-3'-phosphate
  modified_base 19: mod_base = OTHER; note = 2'-O-methylcytidine-3'-phosphorothioate
  modified_base 20: mod_base = OTHER; note = 2'-O-methyluridine-3'-phosphorothioate
  modified_base 21: mod_base = OTHER; note = 2'-O-methyladenosine
tttatacagctgtattgtcta

SEQ ID NO: 896 - RNA, 21 nt, synthetic construct
  source 1..21: mol_type = other RNA
  modified_base 1: mod_base = OTHER; note = 2'-O-methyladenosine-3'-phosphorothioate
  modified_base 2: mod_base = OTHER; note = 2'-O-methyluridine-3'-phosphorothioate
  modified_base 3: mod_base = OTHER; note = 2'-O-methyluridine-3'-phosphate
  modified_base 4: mod_base = OTHER; note = 2'-O-methylguanosine-3'-phosphate
  modified_base 5: mod_base = OTHER; note = 2'-O-methyluridine-3'-phosphate
  modified_base 6: mod_base = OTHER; note = 2'-O-methylcytidine-3'-phosphate
  modified_base 7: mod_base = OTHER; note = 2'-O-methyluridine-3'-phosphate
  modified_base 8: mod_base = OTHER; note = 2'-O-methylguanosine-3'-phosphate
  modified_base 9: mod_base = OTHER; note = 2'-deoxy-2'-fluoroadenosine-3'-phosphate
  modified_base 10: mod_base = OTHER; note = 2'-deoxy-2'-fluoroadenosine-3'-phosphate
  modified_base 11: mod_base = OTHER; note = 2'-deoxy-2'-fluorocytidine-3'-phosphate
  modified_base 12: mod_base = OTHER; note = 2'-O-methyluridine-3'-phosphate
  modified_base 13: mod_base = OTHER; note = 2'-O-methyluridine-3'-phosphate
  modified_base 14: mod_base = OTHER; note = 2'-O-methylguanosine-3'-phosphate
  modified_base 15: mod_base = OTHER; note = 2'-O-methylcytidine-3'-phosphate
  modified_base 16: mod_base = OTHER; note = 2'-O-methyladenosine-3'-phosphate
  modified_base 17: mod_base = OTHER; note = 2'-O-methyluridine-3'-phosphate
  modified_base 18: mod_base = OTHER; note = 2'-O-methyluridine-3'-phosphate
  modified_base 19: mod_base = OTHER; note = 2'-O-methylguanosine-3'-phosphorothioate
  modified_base 20: mod_base = OTHER; note = 2'-O-methyluridine-3'-phosphorothioate
  modified_base 21: mod_base = OTHER; note = 2'-O-methyladenosine
attgtctgaacttgcattgta

SEQ ID NO: 897 - RNA, 21 nt, synthetic construct
  source 1..21: mol_type = other RNA
  modified_base 1: mod_base = OTHER; note = 2'-O-methyluridine-3'-phosphorothioate
  modified_base 2: mod_base = OTHER; note = 2'-O-methyluridine-3'-phosphorothioate
  modified_base 3: mod_base = OTHER; note = 2'-O-methylguanosine-3'-phosphate
  modified_base 4: mod_base = OTHER; note = 2'-O-methylguanosine-3'-phosphate
  modified_base 5: mod_base = OTHER; note = 2'-O-methylcytidine-3'-phosphate
  modified_base 6: mod_base = OTHER; note = 2'-O-methylcytidine-3'-phosphate
  modified_base 7: mod_base = OTHER; note = 2'-deoxy-2'-fluorouridine-3'-phosphate
  modified_base 8: mod_base = OTHER; note = 2'-O-methylguanosine-3'-phosphate
  modified_base 9: mod_base = OTHER; note = 2'-deoxy-2'-fluorouridine-3'-phosphate
  modified_base 10: mod_base = OTHER; note = 2'-deoxy-2'-fluoroadenosine-3'-phosphate
  modified_base 11: mod_base = OTHER; note = 2'-deoxy-2'-fluoroguanosine-3'-phosphate
  modified_base 12: mod_base = OTHER; note = 2'-O-methyladenosine-3'-phosphate
  modified_base 13: mod_base = OTHER; note = 2'-O-methylguanosine-3'-phosphate
  modified_base 14: mod_base = OTHER; note = 2'-O-methyluridine-3'-phosphate
  modified_base 15: mod_base = OTHER; note = 2'-O-methyluridine-3'-phosphate
  modified_base 16: mod_base = OTHER; note = 2'-O-methylguanosine-3'-phosphate
  modified_base 17: mod_base = OTHER; note = 2'-O-methylcytidine-3'-phosphate
  modified_base 18: mod_base = OTHER; note = 2'-O-methyluridine-3'-phosphate
  modified_base 19: mod_base = OTHER; note = 2'-O-methylguanosine-3'-phosphorothioate
  modified_base 20: mod_base = OTHER; note = 2'-O-methyladenosine-3'-phosphorothioate
  modified_base 21: mod_base = OTHER; note = 2'-O-methyladenosine
ttggcctgtagagttgctgaa

SEQ ID NO: 898 - RNA, 21 nt, synthetic construct
  source 1..21: mol_type = other RNA
  modified_base 1: mod_base = OTHER; note = 2'-O-methyladenosine-3'-phosphorothioate
  modified_base 2: mod_base = OTHER; note = 2'-O-methylguanosine-3'-phosphorothioate
  modified_base 3: mod_base = OTHER; note = 2'-O-methyluridine-3'-phosphate
  modified_base 4: mod_base = OTHER; note = 2'-O-methylguanosine-3'-phosphate
  modified_base 5: mod_base = OTHER; note = 2'-O-methylcytidine-3'-phosphate
  modified_base 6: mod_base = OTHER; note = 2'-O-methylcytidine-3'-phosphate
  modified_base 7: mod_base = OTHER; note = 2'-deoxy-2'-fluorouridine-3'-phosphate
  modified_base 8: mod_base = OTHER; note = 2'-O-methylguanosine-3'-phosphate
  modified_base 9: mod_base = OTHER; note = 2'-deoxy-2'-fluoroadenosine-3'-phosphate
  modified_base 10: mod_base = OTHER; note = 2'-deoxy-2'-fluorocytidine-3'-phosphate
  modified_base 11: mod_base = OTHER; note = 2'-deoxy-2'-fluoroadenosine-3'-phosphate
  modified_base 12: mod_base = OTHER; note = 2'-O-methylcytidine-3'-phosphate
  modified_base 13: mod_base = OTHER; note = 2'-O-methyladenosine-3'-phosphate
  modified_base 14: mod_base = OTHER; note = 2'-O-methylcytidine-3'-phosphate
  modified_base 15: mod_base = OTHER; note = 2'-O-methyluridine-3'-phosphate
  modified_base 16: mod_base = OTHER; note = 2'-O-methyladenosine-3'-phosphate
  modified_base 17: mod_base = OTHER; note = 2'-O-methyladenosine-3'-phosphate
  modified_base 18: mod_base = OTHER; note = 2'-O-methylcytidine-3'-phosphate
  modified_base 19: mod_base = OTHER; note = 2'-O-methylcytidine-3'-phosphorothioate
  modified_base 20: mod_base = OTHER; note = 2'-O-methyladenosine-3'-phosphorothioate
  modified_base 21: mod_base = OTHER; note = 2'-O-methyladenosine
agtgcctgacacactaaccaa

SEQ ID NO: 899 - RNA, 21 nt, synthetic construct
  source 1..21: mol_type = other RNA
  modified_base 1: mod_base = OTHER; note = 2'-O-methylcytidine-3'-phosphorothioate
  modified_base 2: mod_base = OTHER; note = 2'-O-methyluridine-3'-phosphorothioate
  modified_base 3: mod_base = OTHER; note = 2'-O-methylguanosine-3'-phosphate
  modified_base 4: mod_base = OTHER; note = 2'-O-methyladenosine-3'-phosphate
  modified_base 5: mod_base = OTHER; note = 2'-O-methylcytidine-3'-phosphate
  modified_base 6: mod_base = OTHER; note = 2'-O-methyladenosine-3'-phosphate
  modified_base 7: mod_base = OTHER; note = 2'-O-methylcytidine-3'-phosphate
  modified_base 8: mod_base = OTHER; note = 2'-O-methyladenosine-3'-phosphate
  modified_base 9: mod_base = OTHER; note = 2'-deoxy-2'-fluorocytidine-3'-phosphate
  modified_base 10: mod_base = OTHER; note = 2'-deoxy-2'-fluorouridine-3'-phosphate
  modified_base 11: mod_base = OTHER; note = 2'-deoxy-2'-fluoroadenosine-3'-phosphate
  modified_base 12: mod_base = OTHER; note = 2'-O-methyladenosine-3'-phosphate
  modified_base 13: mod_base = OTHER; note = 2'-O-methylcytidine-3'-phosphate
  modified_base 14: mod_base = OTHER; note = 2'-O-methylcytidine-3'-phosphate
  modified_base 15: mod_base = OTHER; note = 2'-O-methyladenosine-3'-phosphate
  modified_base 16: mod_base = OTHER; note = 2'-O-methyladenosine-3'-phosphate
  modified_base 17: mod_base = OTHER; note = 2'-O-methylguanosine-3'-phosphate
  modified_base 18: mod_base = OTHER; note = 2'-O-methylcytidine-3'-phosphate
  modified_base 19: mod_base = OTHER; note = 2'-O-methyluridine-3'-phosphorothioate
  modified_base 20: mod_base = OTHER; note = 2'-O-methylguanosine-3'-phosphorothioate
  modified_base 21: mod_base = OTHER; note = 2'-O-methyladenosine
ctgacacactaaccaagctga

SEQ ID NO: 900 - RNA, 21 nt, synthetic construct
  source 1..21: mol_type = other RNA
  modified_base 1: mod_base = OTHER; note = 2'-O-methyluridine-3'-phosphorothioate
  modified_base 2: mod_base = OTHER; note = 2'-O-methyladenosine-3'-phosphorothioate
  modified_base 3: mod_base = OTHER; note = 2'-O-methyladenosine-3'-phosphate
  modified_base 4: mod_base = OTHER; note = 2'-O-methylcytidine-3'-phosphate
  modified_base 5: mod_base = OTHER; note = 2'-O-methylcytidine-3'-phosphate
  modified_base 6: mod_base = OTHER; note = 2'-O-methyladenosine-3'-phosphate
  modified_base 7: mod_base = OTHER; note = 2'-O-methyladenosine-3'-phosphate
  modified_base 8: mod_base = OTHER; note = 2'-O-methylguanosine-3'-phosphate
  modified_base 9: mod_base = OTHER; note = 2'-deoxy-2'-fluorocytidine-3'-phosphate
  modified_base 10: mod_base = OTHER; note = 2'-deoxy-2'-fluorouridine-3'-phosphate
  modified_base 11: mod_base = OTHER; note = 2'-deoxy-2'-fluoroguanosine-3'-phosphate
  modified_base 12: mod_base = OTHER; note = 2'-O-methyladenosine-3'-phosphate
  modified_base 13: mod_base = OTHER; note = 2'-O-methylguanosine-3'-phosphate
  modified_base 14: mod_base = OTHER; note = 2'-O-methyluridine-3'-phosphate
  modified_base 15: mod_base = OTHER; note = 2'-O-methyluridine-3'-phosphate
  modified_base 16: mod_base = OTHER; note = 2'-O-methyluridine-3'-phosphate
  modified_base 17: mod_base = OTHER; note = 2'-O-methylcytidine-3'-phosphate
  modified_base 18: mod_base = OTHER; note = 2'-O-methylcytidine-3'-phosphate
  modified_base 19: mod_base = OTHER; note = 2'-O-methyluridine-3'-phosphorothioate
  modified_base 20: mod_base = OTHER; note = 2'-O-methyladenosine-3'-phosphorothioate
  modified_base 21: mod_base = OTHER; note = 2'-O-methyladenosine
taaccaagctgagtttcctaa

SEQ ID NO: 901 - RNA, 21 nt, synthetic construct
  source 1..21: mol_type = other RNA
  modified_base 1: mod_base = OTHER; note = 2'-O-methyladenosine-3'-phosphorothioate
  modified_base 2: mod_base = OTHER; note = 2'-O-methylguanosine-3'-phosphorothioate
  modified_base 3: mod_base = OTHER; note = 2'-O-methylcytidine-3'-phosphate
  modified_base 4: mod_base = OTHER; note = 2'-O-methyluridine-3'-phosphate
  modified_base 5: mod_base = OTHER; note = 2'-O-methylguanosine-3'-phosphate
  modified_base 6: mod_base = OTHER; note = 2'-O-methyladenosine-3'-phosphate
  modified_base 7: mod_base = OTHER; note = 2'-deoxy-2'-fluoroguanosine-3'-phosphate
  modified_base 8: mod_base = OTHER; note = 2'-O-methyluridine-3'-phosphate
  modified_base 9: mod_base = OTHER; note = 2'-deoxy-2'-fluorouridine-3'-phosphate
  modified_base 10: mod_base = OTHER; note = 2'-deoxy-2'-fluorouridine-3'-phosphate
  modified_base 11: mod_base = OTHER; note = 2'-deoxy-2'-fluorocytidine-3'-phosphate
  modified_base 12: mod_base = OTHER; note = 2'-O-methylcytidine-3'-phosphate
  modified_base 13: mod_base = OTHER; note = 2'-O-methyluridine-3'-phosphate
  modified_base 14: mod_base = OTHER; note = 2'-O-methyladenosine-3'-phosphate
  modified_base 15: mod_base = OTHER; note = 2'-O-methyluridine-3'-phosphate
  modified_base 16: mod_base = OTHER; note = 2'-O-methylguanosine-3'-phosphate
  modified_base 17: mod_base = OTHER; note = 2'-O-methylguanosine-3'-phosphate
  modified_base 18: mod_base = OTHER; note = 2'-O-methylguanosine-3'-phosphate
  modified_base 19: mod_base = OTHER; note = 2'-O-methyladenosine-3'-phosphorothioate
  modified_base 20: mod_base = OTHER; note = 2'-O-methyladenosine-3'-phosphorothioate
  modified_base 21: mod_base = OTHER; note = 2'-O-methyladenosine
agctgagtttcctatgggaaa

SEQ ID NO: 902 - RNA, 21 nt, synthetic construct
  source 1..21: mol_type = other RNA
  modified_base 1: mod_base = OTHER; note = 2'-O-methyluridine-3'-phosphorothioate
  modified_base 2: mod_base = OTHER; note = 2'-O-methyluridine-3'-phosphorothioate
  modified_base 3: mod_base = OTHER; note = 2'-O-methyluridine-3'-phosphate
  modified_base 4: mod_base = OTHER; note = 2'-O-methylcytidine-3'-phosphate
  modified_base 5: mod_base = OTHER; note = 2'-O-methylcytidine-3'-phosphate
  modified_base 6: mod_base = OTHER; note = 2'-O-methyluridine-3'-phosphate
  modified_base 7: mod_base = OTHER; note = 2'-O-methyladenosine-3'-phosphate
  modified_base 8: mod_base = OTHER; note = 2'-O-methyluridine-3'-phosphate
  modified_base 9: mod_base = OTHER; note = 2'-deoxy-2'-fluoroguanosine-3'-phosphate
  modified_base 10: mod_base = OTHER; note = 2'-deoxy-2'-fluoroguanosine-3'-phosphate
  modified_base 11: mod_base = OTHER; note = 2'-deoxy-2'-fluoroguanosine-3'-phosphate
  modified_base 12: mod_base = OTHER; note = 2'-O-methyladenosine-3'-phosphate
  modified_base 13: mod_base = OTHER; note = 2'-O-methyladenosine-3'-phosphate
  modified_base 14: mod_base = OTHER; note = 2'-O-methylcytidine-3'-phosphate
  modified_base 15: mod_base = OTHER; note = 2'-O-methyladenosine-3'-phosphate
  modified_base 16: mod_base = OTHER; note = 2'-O-methyladenosine-3'-phosphate
  modified_base 17: mod_base = OTHER; note = 2'-O-methyluridine-3'-phosphate
  modified_base 18: mod_base = OTHER; note = 2'-O-methyluridine-3'-phosphate
  modified_base 19: mod_base = OTHER; note = 2'-O-methylguanosine-3'-phosphorothioate
  modified_base 20: mod_base = OTHER; note = 2'-O-methyladenosine-3'-phosphorothioate
  modified_base 21: mod_base = OTHER; note = 2'-O-methyladenosine
tttcctatgggaacaattgaa

SEQ ID NO: 903 - RNA, 21 nt, synthetic construct
  source 1..21: mol_type = other RNA
  modified_base 1: mod_base = OTHER; note = 2'-O-methylguanosine-3'-phosphorothioate
  modified_base 2: mod_base = OTHER; note = 2'-O-methyluridine-3'-phosphorothioate
  modified_base 3: mod_base = OTHER; note = 2'-O-methylcytidine-3'-phosphate
  modified_base 4: mod_base = OTHER; note = 2'-O-methylguanosine-3'-phosphate
  modified_base 5: mod_base = OTHER; note = 2'-O-methyladenosine-3'-phosphate
  modified_base 6: mod_base = OTHER; note = 2'-O-methylguanosine-3'-phosphate
  modified_base 7: mod_base = OTHER; note = 2'-deoxy-2'-fluoroguanosine-3'-phosphate
  modified_base 8: mod_base = OTHER; note = 2'-O-methyladenosine-3'-phosphate
  modified_base 9: mod_base = OTHER; note = 2'-deoxy-2'-fluoroguanosine-3'-phosphate
  modified_base 10: mod_base = OTHER; note = 2'-deoxy-2'-fluorouridine-3'-phosphate
  modified_base 11: mod_base = OTHER; note = 2'-deoxy-2'-fluoroadenosine-3'-phosphate
  modified_base 12: mod_base = OTHER; note = 2'-O-methyladenosine-3'-phosphate
  modified_base 13: mod_base = OTHER; note = 2'-O-methylcytidine-3'-phosphate
  modified_base 14: mod_base = OTHER; note = 2'-O-methyladenosine-3'-phosphate
  modified_base 15: mod_base = OTHER; note = 2'-O-methyladenosine-3'-phosphate
  modified_base 16: mod_base = OTHER; note = 2'-O-methyluridine-3'-phosphate
  modified_base 17: mod_base = OTHER; note = 2'-O-methyladenosine-3'-phosphate
  modified_base 18: mod_base = OTHER; note = 2'-O-methylcytidine-3'-phosphate
  modified_base 19: mod_base = OTHER; note = 2'-O-methyladenosine-3'-phosphorothioate
  modified_base 20: mod_base = OTHER; note = 2'-O-methyladenosine-3'-phosphorothioate
  modified_base 21: mod_base = OTHER; note = 2'-O-methyladenosine
gtcgaggagtaacaatacaaa

SEQ ID NO: 904 - RNA, 21 nt, synthetic construct
  source 1..21: mol_type = other RNA
  modified_base 1: mod_base = OTHER; note = 2'-O-methylguanosine-3'-phosphorothioate
  modified_base 2: mod_base = OTHER; note = 2'-O-methyluridine-3'-phosphorothioate
  modified_base 3: mod_base = OTHER; note = 2'-O-methylcytidine-3'-phosphate
  modified_base 4: mod_base = OTHER; note = 2'-O-methylguanosine-3'-phosphate
  modified_base 5: mod_base = OTHER; note = 2'-O-methyladenosine-3'-phosphate
  modified_base 6: mod_base = OTHER; note = 2'-O-methylguanosine-3'-phosphate
  modified_base 7: mod_base = OTHER; note = 2'-O-methylguanosine-3'-phosphate
  modified_base 8: mod_base = OTHER; note = 2'-O-methyladenosine-3'-phosphate
  modified_base 9: mod_base = OTHER; note = 2'-deoxy-2'-fluoroguanosine-3'-phosphate
  modified_base 10: mod_base = OTHER; note = 2'-deoxy-2'-fluorouridine-3'-phosphate
  modified_base 11: mod_base = OTHER; note = 2'-deoxy-2'-fluoroadenosine-3'-phosphate
  modified_base 12: mod_base = OTHER; note = 2'-O-methyladenosine-3'-phosphate
  modified_base 13: mod_base = OTHER; note = 2'-O-methylcytidine-3'-phosphate
  modified_base 14: mod_base = OTHER; note = 2'-O-methyladenosine-3'-phosphate
  modified_base 15: mod_base = OTHER; note = 2'-O-methyladenosine-3'-phosphate
  modified_base 16: mod_base = OTHER; note = 2'-O-methyluridine-3'-phosphate
  modified_base 17: mod_base = OTHER; note = 2'-O-methyladenosine-3'-phosphate
  modified_base 18: mod_base = OTHER; note = 2'-O-methylcytidine-3'-phosphate
  modified_base 19: mod_base = OTHER; note = 2'-O-methyladenosine-3'-phosphorothioate
  modified_base 20: mod_base = OTHER; note = 2'-O-methyladenosine-3'-phosphorothioate
  modified_base 21: mod_base = OTHER; note = 2'-O-methyladenosine
gtcgaggagtaacaatacaaa

SEQ ID NO: 905 - RNA, 21 nt, synthetic construct
  source 1..21: mol_type = other RNA
  modified_base 1: mod_base = OTHER; note = 2'-O-methyladenosine-3'-phosphorothioate
  modified_base 2: mod_base = OTHER; note = 2'-O-methyluridine-3'-phosphorothioate
  modified_base 3: mod_base = OTHER; note = 2'-O-methylcytidine-3'-phosphate
  modified_base 4: mod_base = OTHER; note = 2'-O-methyladenosine-3'-phosphate
  modified_base 5: mod_base = OTHER; note = 2'-O-methyladenosine-3'-phosphate
  modified_base 6: mod_base = OTHER; note = 2'-O-methyladenosine-3'-phosphate
  modified_base 7: mod_base = OTHER; note = 2'-deoxy-2'-fluorocytidine-3'-phosphate
  modified_base 8: mod_base = OTHER; note = 2'-O-methylcytidine-3'-phosphate
  modified_base 9: mod_base = OTHER; note = 2'-deoxy-2'-fluorocytidine-3'-phosphate
  modified_base 10: mod_base = OTHER; note = 2'-deoxy-2'-fluorouridine-3'-phosphate
  modified_base 11: mod_base = OTHER; note = 2'-deoxy-2'-fluoroadenosine-3'-phosphate
  modified_base 12: mod_base = OTHER; note = 2'-O-methylguanosine-3'-phosphate
  modified_base 13: mod_base = OTHER; note = 2'-O-methylcytidine-3'-phosphate
  modified_base 14: mod_base = OTHER; note = 2'-O-methylcytidine-3'-phosphate
  modified_base 15: mod_base = OTHER; note = 2'-O-methyluridine-3'-phosphate
  modified_base 16: mod_base = OTHER; note = 2'-O-methyluridine-3'-phosphate
  modified_base 17: mod_base = OTHER; note = 2'-O-methylguanosine-3'-phosphate
  modified_base 18: mod_base = OTHER; note = 2'-O-methylcytidine-3'-phosphate
  modified_base 19: mod_base = OTHER; note = 2'-O-methyluridine-3'-phosphorothioate
  modified_base 20: mod_base = OTHER; note = 2'-O-methyluridine-3'-phosphorothioate
  modified_base 21: mod_base = OTHER; note = 2'-O-methyladenosine
atcaaaccctagccttgctta

SEQ ID NO: 906 - RNA, 21 nt, synthetic construct
  source 1..21: mol_type = other RNA
  modified_base 1: mod_base = OTHER; note = 2'-O-methyluridine-3'-phosphorothioate
  modified_base 2: mod_base = OTHER; note = 2'-O-methyluridine-3'-phosphorothioate
  modified_base 3: mod_base = OTHER; note = 2'-O-methyluridine-3'-phosphate
  modified_base 4: mod_base = OTHER; note = 2'-O-methylguanosine-3'-phosphate
  modified_base 5: mod_base = OTHER; note = 2'-O-methylcytidine-3'-phosphate
  modified_base 6: mod_base = OTHER; note = 2'-O-methyluridine-3'-phosphate
  modified_base 7: mod_base = OTHER; note = 2'-deoxy-2'-fluorouridine-3'-phosphate
  modified_base 8: mod_base = OTHER; note = 2'-O-methylguanosine-3'-phosphate
  modified_base 9: mod_base = OTHER; note = 2'-deoxy-2'-fluorocytidine-3'-phosphate
  modified_base 10: mod_base = OTHER; note = 2'-deoxy-2'-fluorouridine-3'-phosphate
  modified_base 11: mod_base = OTHER; note = 2'-deoxy-2'-fluorouridine-3'-phosphate
  modified_base 12: mod_base = OTHER; note = 2'-O-methyluridine-3'-phosphate
  modified_base 13: mod_base = OTHER; note = 2'-O-methylguanosine-3'-phosphate
  modified_base 14: mod_base = OTHER; note = 2'-O-methyladenosine-3'-phosphate
  modified_base 15: mod_base = OTHER; note = 2'-O-methyladenosine-3'-phosphate
  modified_base 16: mod_base = OTHER; note = 2'-O-methylguanosine-3'-phosphate
  modified_base 17: mod_base = OTHER; note = 2'-O-methyluridine-3'-phosphate
  modified_base 18: mod_base = OTHER; note = 2'-O-methyladenosine-3'-phosphate
  modified_base 19: mod_base = OTHER; note = 2'-O-methylguanosine-3'-phosphorothioate
  modified_base 20: mod_base = OTHER; note = 2'-O-methylcytidine-3'-phosphorothioate
  modified_base 21: mod_base = OTHER; note = 2'-O-methyladenosine
tttgcttgctttgaagtagca

SEQ ID NO: 907 - RNA, 21 nt, synthetic construct
  source 1..21: mol_type = other RNA
  modified_base 1: mod_base = OTHER; note = 2'-O-methyluridine-3'-phosphorothioate
  modified_base 2: mod_base = OTHER; note = 2'-O-methylguanosine-3'-phosphorothioate
  modified_base 3: mod_base = OTHER; note = 2'-O-methylcytidine-3'-phosphate
  modified_base 4: mod_base = OTHER; note = 2'-O-methyluridine-3'-phosphate
  modified_base 5: mod_base = OTHER; note = 2'-O-methyluridine-3'-phosphate
  modified_base 6: mod_base = OTHER; note = 2'-O-methylguanosine-3'-phosphate
  modified_base 7: mod_base = OTHER; note = 2'-deoxy-2'-fluorocytidine-3'-phosphate
  modified_base 8: mod_base = OTHER; note = 2'-O-methyluridine-3'-phosphate
  modified_base 9: mod_base = OTHER; note = 2'-deoxy-2'-fluorouridine-3'-phosphate
  modified_base 10: mod_base = OTHER; note = 2'-deoxy-2'-fluorouridine-3'-phosphate
  modified_base 11: mod_base = OTHER; note = 2'-deoxy-2'-fluoroguanosine-3'-phosphate
  modified_base 12: mod_base = OTHER; note = 2'-O-methyladenosine-3'-phosphate
  modified_base 13: mod_base = OTHER; note = 2'-O-methyladenosine-3'-phosphate
  modified_base 14: mod_base = OTHER; note = 2'-O-methylguanosine-3'-phosphate
  modified_base 15: mod_base = OTHER; note = 2'-O-methyluridine-3'-phosphate
  modified_base 16: mod_base = OTHER; note = 2'-O-methyladenosine-3'-phosphate
  modified_base 17: mod_base = OTHER; note = 2'-O-methylguanosine-3'-phosphate
  modified_base 18: mod_base = OTHER; note = 2'-O-methylcytidine-3'-phosphate
  modified_base 19: mod_base = OTHER; note = 2'-O-methyluridine-3'-phosphorothioate
  modified_base 20: mod_base = OTHER; note = 2'-O-methylcytidine-3'-phosphorothioate
  modified_base 21: mod_base = OTHER; note = 2'-O-methyladenosine
tgcttgctttgaagtagctca

SEQ ID NO: 908 - RNA, 21 nt, synthetic construct
  source 1..21: mol_type = other RNA
  modified_base 1: mod_base = OTHER; note = 2'-O-methylguanosine-3'-phosphorothioate
  modified_base 2: mod_base = OTHER; note = 2'-O-methylcytidine-3'-phosphorothioate
  modified_base 3: mod_base = OTHER; note = 2'-O-methyluridine-3'-phosphate
  modified_base 4: mod_base = OTHER; note = 2'-O-methyluridine-3'-phosphate
  modified_base 5: mod_base = OTHER; note = 2'-O-methylguanosine-3'-phosphate
  modified_base 6: mod_base = OTHER; note = 2'-O-methylcytidine-3'-phosphate
  modified_base 7: mod_base = OTHER; note = 2'-deoxy-2'-fluorouridine-3'-phosphate
  modified_base 8: mod_base = OTHER; note = 2'-O-methyluridine-3'-phosphate
  modified_base 9: mod_base = OTHER; note = 2'-deoxy-2'-fluorouridine-3'-phosphate
  modified_base 10: mod_base = OTHER; note = 2'-deoxy-2'-fluoroguanosine-3'-phosphate
  modified_base 11: mod_base = OTHER; note = 2'-deoxy-2'-fluoroadenosine-3'-phosphate
  modified_base 12: mod_base = OTHER; note = 2'-O-methyladenosine-3'-phosphate
  modified_base 13: mod_base = OTHER; note = 2'-O-methylguanosine-3'-phosphate
  modified_base 14: mod_base = OTHER; note = 2'-O-methyluridine-3'-phosphate
  modified_base 15: mod_base = OTHER; note = 2'-O-methyladenosine-3'-phosphate
  modified_base 16: mod_base = OTHER; note = 2'-O-methylguanosine-3'-phosphate
  modified_base 17: mod_base = OTHER; note = 2'-O-methylcytidine-3'-phosphate
  modified_base 18: mod_base = OTHER; note = 2'-O-methyluridine-3'-phosphate
  modified_base 19: mod_base = OTHER; note = 2'-O-methylcytidine-3'-phosphorothioate
  modified_base 20: mod_base = OTHER; note = 2'-O-methyluridine-3'-phosphorothioate
  modified_base 21: mod_base = OTHER; note = 2'-O-methyladenosine
gcttgctttgaagtagctcta

SEQ ID NO: 909 - RNA, 21 nt, synthetic construct
  source 1..21: mol_type = other RNA
  modified_base 1: mod_base = OTHER; note = 2'-O-methyladenosine-3'-phosphorothioate
  modified_base 2: mod_base = OTHER; note = 2'-O-methyladenosine-3'-phosphorothioate
  modified_base 3: mod_base = OTHER; note = 2'-O-methylguanosine-3'-phosphate
  modified_base 4: mod_base = OTHER; note = 2'-O-methyluridine-3'-phosphate
  modified_base 5: mod_base = OTHER; note = 2'-O-methylcytidine-3'-phosphate
  modified_base 6: mod_base = OTHER; note = 2'-O-methyluridine-3'-phosphate
  modified_base 7: mod_base = OTHER; note = 2'-O-methylcytidine-3'-phosphate
  modified_base 8: mod_base = OTHER; note = 2'-O-methyluridine-3'-phosphate
  modified_base 9: mod_base = OTHER; note = 2'-deoxy-2'-fluorocytidine-3'-phosphate
  modified_base 10: mod_base = OTHER; note = 2'-deoxy-2'-fluoroguanosine-3'-phosphate
  modified_base 11: mod_base = OTHER; note = 2'-deoxy-2'-fluorouridine-3'-phosphate
  modified_base 12: mod_base = OTHER; note = 2'-O-methyladenosine-3'-phosphate
  modified_base 13: mod_base = OTHER; note = 2'-O-methylguanosine-3'-phosphate
  modified_base 14: mod_base = OTHER; note = 2'-O-methyluridine-3'-phosphate
  modified_base 15: mod_base = OTHER; note = 2'-O-methylguanosine-3'-phosphate
  modified_base 16: mod_base = OTHER; note = 2'-O-methyluridine-3'-phosphate
  modified_base 17: mod_base = OTHER; note = 2'-O-methyluridine-3'-phosphate
  modified_base 18: mod_base = OTHER; note = 2'-O-methyladenosine-3'-phosphate
  modified_base 19: mod_base = OTHER; note = 2'-O-methyladenosine-3'-phosphorothioate
  modified_base 20: mod_base = OTHER; note = 2'-O-methylguanosine-3'-phosphorothioate
  modified_base 21: mod_base = OTHER; note = 2'-O-methyladenosine
aagtctctcgtagtgttaaga

SEQ ID NO: 910 - RNA, 21 nt, synthetic construct
  source 1..21: mol_type = other RNA
  modified_base 1: mod_base = OTHER; note = 2'-O-methyluridine-3'-phosphorothioate
  modified_base 2: mod_base = OTHER; note = 2'-O-methylcytidine-3'-phosphorothioate
  modified_base 3: mod_base = OTHER; note = 2'-O-methyluridine-3'-phosphate
  modified_base 4: mod_base = OTHER; note = 2'-O-methylcytidine-3'-phosphate
  modified_base 5: mod_base = OTHER; note = 2'-O-methyluridine-3'-phosphate
  modified_base 6: mod_base = OTHER; note = 2'-O-methylcytidine-3'-phosphate
  modified_base 7: mod_base = OTHER; note = 2'-deoxy-2'-fluoroguanosine-3'-phosphate
  modified_base 8: mod_base = OTHER; note = 2'-O-methyluridine-3'-phosphate
  modified_base 9: mod_base = OTHER; note = 2'-deoxy-2'-fluoroadenosine-3'-phosphate
  modified_base 10: mod_base = OTHER; note = 2'-deoxy-2'-fluoroguanosine-3'-phosphate
  modified_base 11: mod_base = OTHER; note = 2'-deoxy-2'-fluorouridine-3'-phosphate
  modified_base 12: mod_base = OTHER; note = 2'-O-methylguanosine-3'-phosphate
  modified_base 13: mod_base = OTHER; note = 2'-O-methyluridine-3'-phosphate
  modified_base 14: mod_base = OTHER; note = 2'-O-methyluridine-3'-phosphate
  modified_base 15: mod_base = OTHER; note = 2'-O-methyladenosine-3'-phosphate
  modified_base 16: mod_base = OTHER; note = 2'-O-methyladenosine-3'-phosphate
  modified_base 17: mod_base = OTHER; note = 2'-O-methylguanosine-3'-phosphate
  modified_base 18: mod_base = OTHER; note = 2'-O-methyluridine-3'-phosphate
  modified_base 19: mod_base = OTHER; note = 2'-O-methyluridine-3'-phosphorothioate
  modified_base 20: mod_base = OTHER; note = 2'-O-methyladenosine-3'-phosphorothioate
  modified_base 21: mod_base = OTHER; note = 2'-O-methyladenosine
tctctcgtagtgttaagttaa

SEQ ID NO: 911 - RNA, 21 nt, synthetic construct
  source 1..21: mol_type = other RNA
  modified_base 1: mod_base = OTHER; note = 2'-O-methylcytidine-3'-phosphorothioate
  modified_base 2: mod_base = OTHER; note = 2'-O-methyluridine-3'-phosphorothioate
  modified_base 3: mod_base = OTHER; note = 2'-O-methylcytidine-3'-phosphate
  modified_base 4: mod_base = OTHER; note = 2'-O-methyluridine-3'-phosphate
  modified_base 5: mod_base = OTHER; note = 2'-O-methylcytidine-3'-phosphate
  modified_base 6: mod_base = OTHER; note = 2'-O-methylguanosine-3'-phosphate
  modified_base 7: mod_base = OTHER; note = 2'-deoxy-2'-fluorouridine-3'-phosphate
  modified_base 8: mod_base = OTHER; note = 2'-O-methyladenosine-3'-phosphate
  modified_base 9: mod_base = OTHER; note = 2'-deoxy-2'-fluoroguanosine-3'-phosphate
  modified_base 10: mod_base = OTHER; note = 2'-deoxy-2'-fluorouridine-3'-phosphate
  modified_base 11: mod_base = OTHER; note = 2'-deoxy-2'-fluoroguanosine-3'-phosphate
  modified_base 12: mod_base = OTHER; note = 2'-O-methyluridine-3'-phosphate
  modified_base 13: mod_base = OTHER; note = 2'-O-methyluridine-3'-phosphate
  modified_base 14: mod_base = OTHER; note = 2'-O-methyladenosine-3'-phosphate
  modified_base 15: mod_base = OTHER; note = 2'-O-methyladenosine-3'-phosphate
  modified_base 16: mod_base = OTHER; note = 2'-O-methylguanosine-3'-phosphate
  modified_base 17: mod_base = OTHER; note = 2'-O-methyluridine-3'-phosphate
  modified_base 18: mod_base = OTHER; note = 2'-O-methyluridine-3'-phosphate
  modified_base 19: mod_base = OTHER; note = 2'-O-methyladenosine-3'-phosphorothioate
  modified_base 20: mod_base = OTHER; note = 2'-O-methyluridine-3'-phosphorothioate
  modified_base 21: mod_base = OTHER; note = 2'-O-methyladenosine
ctctcgtagtgttaagttata

SEQ ID NO: 912 - RNA, 21 nt, synthetic construct
  source 1..21: mol_type = other RNA
  modified_base 1: mod_base = OTHER; note = 2'-O-methylcytidine-3'-phosphorothioate
  modified_base 2: mod_base = OTHER; note = 2'-O-methyluridine-3'-phosphorothioate
  modified_base 3: mod_base = OTHER; note = 2'-O-methylcytidine-3'-phosphate
  modified_base 4: mod_base = OTHER; note = 2'-O-methyluridine-3'-phosphate
  modified_base 5: mod_base = OTHER; note = 2'-O-methylcytidine-3'-phosphate
  modified_base 6: mod_base = OTHER; note = 2'-O-methylguanosine-3'-phosphate
  modified_base 7: mod_base = OTHER; note = 2'-O-methyluridine-3'-phosphate
  modified_base 8: mod_base = OTHER; note = 2'-O-methyladenosine-3'-phosphate
  modified_base 9: mod_base = OTHER; note = 2'-deoxy-2'-fluoroguanosine-3'-phosphate
  modified_base 10: mod_base = OTHER; note = 2'-deoxy-2'-fluorouridine-3'-phosphate
  modified_base 11: mod_base = OTHER; note = 2'-deoxy-2'-fluoroguanosine-3'-phosphate
  modified_base 12: mod_base = OTHER; note = 2'-O-methyluridine-3'-phosphate
  modified_base 13: mod_base = OTHER; note = 2'-O-methyluridine-3'-phosphate
  modified_base 14: mod_base = OTHER; note = 2'-O-methyladenosine-3'-phosphate
  modified_base 15: mod_base = OTHER; note = 2'-O-methyladenosine-3'-phosphate
  modified_base 16: mod_base = OTHER; note = 2'-O-methylguanosine-3'-phosphate
  modified_base 17: mod_base = OTHER; note = 2'-O-methyluridine-3'-phosphate
  modified_base 18: mod_base = OTHER; note = 2'-O-methyluridine-3'-phosphate
  modified_base 19: mod_base = OTHER; note = 2'-O-methyladenosine-3'-phosphorothioate
  modified_base 20: mod_base = OTHER; note = 2'-O-methyluridine-3'-phosphorothioate
  modified_base 21: mod_base = OTHER; note = 2'-O-methyladenosine
ctctcgtagtgttaagttata

SEQ ID NO: 913 - RNA, 21 nt, synthetic construct
  source 1..21: mol_type = other RNA
  modified_base 1: mod_base = OTHER; note = 2'-O-methylcytidine-3'-phosphorothioate
  modified_base 2: mod_base = OTHER; note = 2'-O-methyluridine-3'-phosphorothioate
  modified_base 3: mod_base = OTHER; note = 2'-O-methylcytidine-3'-phosphate
  modified_base 4: mod_base = OTHER; note = 2'-O-methylguanosine-3'-phosphate
  modified_base 5: mod_base = OTHER; note = 2'-O-methyluridine-3'-phosphate
  modified_base 6: mod_base = OTHER; note = 2'-O-methyladenosine-3'-phosphate
  modified_base 7: mod_base = OTHER; note = 2'-O-methylguanosine-3'-phosphate
  modified_base 8: mod_base = OTHER; note = 2'-O-methyluridine-3'-phosphate
  modified_base 9: mod_base = OTHER; note = 2'-deoxy-2'-fluoroguanosine-3'-phosphate
  modified_base 10: mod_base = OTHER; note = 2'-deoxy-2'-fluorouridine-3'-phosphate
  modified_base 11: mod_base = OTHER; note = 2'-deoxy-2'-fluorouridine-3'-phosphate
  modified_base 12: mod_base = OTHER; note = 2'-O-methyladenosine-3'-phosphate
  modified_base 13: mod_base = OTHER; note = 2'-O-methyladenosine-3'-phosphate
  modified_base 14: mod_base = OTHER; note = 2'-O-methylguanosine-3'-phosphate
  modified_base 15: mod_base = OTHER; note = 2'-O-methyluridine-3'-phosphate
  modified_base 16: mod_base = OTHER; note = 2'-O-methyluridine-3'-phosphate
  modified_base 17: mod_base = OTHER; note = 2'-O-methyladenosine-3'-phosphate
  modified_base 18: mod_base = OTHER; note = 2'-O-methyluridine-3'-phosphate
  modified_base 19: mod_base = OTHER; note = 2'-O-methyladenosine-3'-phosphorothioate
  modified_base 20: mod_base = OTHER; note = 2'-O-methylguanosine-3'-phosphorothioate
  modified_base 21: mod_base = OTHER; note = 2'-O-methyladenosine
ctcgtagtgttaagttataga

SEQ ID NO: 914 - RNA, 21 nt, synthetic construct
  source 1..21: mol_type = other RNA
  modified_base 1: mod_base = OTHER; note = 2'-O-methylcytidine-3'-phosphorothioate
  modified_base 2: mod_base = OTHER; note = 2'-O-methylguanosine-3'-phosphorothioate
  modified_base 3: mod_base = OTHER; note = 2'-O-methyluridine-3'-phosphate
  modified_base 4: mod_base = OTHER; note = 2'-O-methyladenosine-3'-phosphate
  modified_base 5: mod_base = OTHER; note = 2'-O-methylguanosine-3'-phosphate
  modified_base 6: mod_base = OTHER; note = 2'-O-methyluridine-3'-phosphate
  modified_base 7: mod_base = OTHER; note = 2'-O-methylguanosine-3'-phosphate
  modified_base 8: mod_base = OTHER; note = 2'-O-methyluridine-3'-phosphate
  modified_base 9: mod_base = OTHER; note = 2'-deoxy-2'-fluorouridine-3'-phosphate
  modified_base 10: mod_base = OTHER; note = 2'-deoxy-2'-fluoroadenosine-3'-phosphate
  modified_base 11: mod_base = OTHER; note = 2'-deoxy-2'-fluoroadenosine-3'-phosphate
  modified_base 12: mod_base = OTHER; note = 2'-O-methylguanosine-3'-phosphate
  modified_base 13: mod_base = OTHER; note = 2'-O-methyluridine-3'-phosphate
  modified_base 14: mod_base = OTHER; note = 2'-O-methyluridine-3'-phosphate
  modified_base 15: mod_base = OTHER; note = 2'-O-methyladenosine-3'-phosphate
  modified_base 16: mod_base = OTHER; note = 2'-O-methyluridine-3'-phosphate
  modified_base 17: mod_base = OTHER; note = 2'-O-methyladenosine-3'-phosphate
  modified_base 18: mod_base = OTHER; note = 2'-O-methylguanosine-3'-phosphate
  modified_base 19: mod_base = OTHER; note = 2'-O-methyluridine-3'-phosphorothioate
  modified_base 20: mod_base = OTHER; note = 2'-O-methylguanosine-3'-phosphorothioate
  modified_base 21: mod_base = OTHER; note = 2'-O-methyladenosine
cgtagtgttaagttatagtga

SEQ ID NO: 915 - RNA, 21 nt, synthetic construct
  source 1..21: mol_type = other RNA
  modified_base 1: mod_base = OTHER; note = 2'-O-methyluridine-3'-phosphorothioate
  modified_base 2: mod_base = OTHER; note = 2'-O-methyladenosine-3'-phosphorothioate
  modified_base 3: mod_base = OTHER; note = 2'-O-methylguanosine-3'-phosphate
  modified_base 4: mod_base = OTHER; note = 2'-O-methyluridine-3'-phosphate
  modified_base 5: mod_base = OTHER; note = 2'-O-methylguanosine-3'-phosphate
  modified_base 6: mod_base = OTHER; note = 2'-O-methyluridine-3'-phosphate
  modified_base 7: mod_base = OTHER; note = 2'-deoxy-2'-fluorouridine-3'-phosphate
  modified_base 8: mod_base = OTHER; note = 2'-O-methyladenosine-3'-phosphate
  modified_base 9: mod_base = OTHER; note = 2'-deoxy-2'-fluoroadenosine-3'-phosphate
  modified_base 10: mod_base = OTHER; note = 2'-deoxy-2'-fluoroguanosine-3'-phosphate
  modified_base 11: mod_base = OTHER; note = 2'-deoxy-2'-fluorouridine-3'-phosphate
  modified_base 12: mod_base = OTHER; note = 2'-O-methyluridine-3'-phosphate
  modified_base 13: mod_base = OTHER; note = 2'-O-methyladenosine-3'-phosphate
  modified_base 14: mod_base = OTHER; note = 2'-O-methyluridine-3'-phosphate
  modified_base 15: mod_base = OTHER; note = 2'-O-methyladenosine-3'-phosphate
  modified_base 16: mod_base = OTHER; note = 2'-O-methylguanosine-3'-phosphate
  modified_base 17: mod_base = OTHER; note = 2'-O-methyluridine-3'-phosphate
  modified_base 18: mod_base = OTHER; note = 2'-O-methylguanosine-3'-phosphate
  modified_base 19: mod_base = OTHER; note = 2'-O-methyladenosine-3'-phosphorothioate
  modified_base 20: mod_base = OTHER; note = 2'-O-methyladenosine-3'-phosphorothioate
  modified_base 21: mod_base = OTHER; note = 2'-O-methyladenosine
tagtgttaagttatagtgaaa

SEQ ID NO: 916 - RNA, 21 nt, synthetic construct
  source 1..21: mol_type = other RNA
  modified_base 1: mod_base = OTHER; note = 2'-O-methylguanosine-3'-phosphorothioate
  modified_base 2: mod_base = OTHER; note = 2'-O-methyluridine-3'-phosphorothioate
  modified_base 3: mod_base = OTHER; note = 2'-O-methylguanosine-3'-phosphate
  modified_base 4: mod_base = OTHER; note = 2'-O-methyladenosine-3'-phosphate
  modified_base 5: mod_base = OTHER; note = 2'-O-methyladenosine-3'-phosphate
  modified_base 6: mod_base = OTHER; note = 2'-O-methyluridine-3'-phosphate
  modified_base 7: mod_base = OTHER; note = 2'-deoxy-2'-fluoroadenosine-3'-phosphate
  modified_base 8: mod_base = OTHER; note = 2'-O-methylcytidine-3'-phosphate
  modified_base 9: mod_base = OTHER; note = 2'-deoxy-2'-fluorouridine-3'-phosphate
  modified_base 10: mod_base = OTHER; note = 2'-deoxy-2'-fluoroguanosine-3'-phosphate
  modified_base 11: mod_base = OTHER; note = 2'-deoxy-2'-fluorocytidine-3'-phosphate
  modified_base 12: mod_base = OTHER; note = 2'-O-methyluridine-3'-phosphate
  modified_base 13: mod_base = OTHER; note = 2'-O-methyladenosine-3'-phosphate
  modified_base 14: mod_base = OTHER; note = 2'-O-methylcytidine-3'-phosphate
  modified_base 15: mod_base = OTHER; note = 2'-O-methyladenosine-3'-phosphate
  modified_base 16: mod_base = OTHER; note = 2'-O-methylguanosine-3'-phosphate
  modified_base 17: mod_base = OTHER; note = 2'-O-methylcytidine-3'-phosphate
  modified_base 18: mod_base = OTHER; note = 2'-O-methyladenosine-3'-phosphate
  modified_base 19: mod_base = OTHER; note = 2'-O-methyladenosine-3'-phosphorothioate
  modified_base 20: mod_base = OTHER; note = 2'-O-methyluridine-3'-phosphorothioate
  modified_base 21: mod_base = OTHER; note = 2'-O-methyladenosine
gtgaatactgctacagcaata

SEQ ID NO: 917 - RNA, 21 nt, synthetic construct
  source 1..21: mol_type = other RNA
  modified_base 1: mod_base = OTHER; note = 2'-O-methylcytidine-3'-phosphorothioate
  modified_base 2: mod_base = OTHER; note = 2'-O-methyluridine-3'-phosphorothioate
  modified_base 3: mod_base = OTHER; note = 2'-O-methylguanosine-3'-phosphate
  modified_base 4: mod_base = OTHER; note = 2'-O-methylcytidine-3'-phosphate
  modified_base 5: mod_base = OTHER; note = 2'-O-methyluridine-3'-phosphate
  modified_base 6: mod_base = OTHER; note = 2'-O-methyladenosine-3'-phosphate
  modified_base 7: mod_base = OTHER; note = 2'-O-methylcytidine-3'-phosphate
  modified_base 8: mod_base = OTHER; note = 2'-O-methyladenosine-3'-phosphate
  modified_base 9: mod_base = OTHER; note = 2'-deoxy-2'-fluoroguanosine-3'-phosphate
  modified_base 10: mod_base = OTHER; note = 2'-deoxy-2'-fluorocytidine-3'-phosphate
  modified_base 11: mod_base = OTHER; note = 2'-deoxy-2'-fluoroadenosine-3'-phosphate
  modified_base 12: mod_base = OTHER; note = 2'-O-methyladenosine-3'-phosphate
  modified_base 13: mod_base = OTHER; note = 2'-O-methyluridine-3'-phosphate
  modified_base 14: mod_base = OTHER; note = 2'-O-methyluridine-3'-phosphate
  modified_base 15: mod_base = OTHER; note = 2'-O-methyluridine-3'-phosphate
  modified_base 16: mod_base = OTHER; note = 2'-O-methylcytidine-3'-phosphate
  modified_base 17: mod_base = OTHER; note = 2'-O-methyluridine-3'-phosphate
  modified_base 18: mod_base = OTHER; note = 2'-O-methyladenosine-3'-phosphate
  modified_base 19: mod_base = OTHER; note = 2'-O-methyladenosine-3'-phosphorothioate
  modified_base 20: mod_base = OTHER; note = 2'-O-methyluridine-3'-phosphorothioate
  modified_base 21: mod_base = OTHER; note = 2'-O-methyladenosine
ctgctacagcaatttctaata

SEQ ID NO: 918 - RNA, 21 nt, synthetic construct
  source 1..21: mol_type = other RNA
  modified_base 1: mod_base = OTHER; note = 2'-O-methylguanosine-3'-phosphorothioate
  modified_base 2: mod_base = OTHER; note = 2'-O-methyladenosine-3'-phosphorothioate
  modified_base 3: mod_base = OTHER; note = 2'-O-methyladenosine-3'-phosphate
  modified_base 4: mod_base = OTHER; note = 2'-O-methyluridine-3'-phosphate
  modified_base 5: mod_base = OTHER; note = 2'-O-methyluridine-3'-phosphate
  modified_base 6: mod_base = OTHER; note = 2'-O-methylguanosine-3'-phosphate
  modified_base 7: mod_base = OTHER; note = 2'-deoxy-2'-fluoroadenosine-3'-phosphate
  modified_base 8: mod_base = OTHER; note = 2'-O-methylguanosine-3'-phosphate
  modified_base 9: mod_base = OTHER; note = 2'-deoxy-2'-fluorouridine-3'-phosphate
  modified_base 10: mod_base = OTHER; note = 2'-deoxy-2'-fluoroadenosine-3'-phosphate
  modified_base 11: mod_base = OTHER; note = 2'-deoxy-2'-fluoroadenosine-3'-phosphate
  modified_base 12: mod_base = OTHER; note = 2'-O-methyluridine-3'-phosphate
  modified_base 13: mod_base = OTHER; note = 2'-O-methylguanosine-3'-phosphate
  modified_base 14: mod_base = OTHER; note = 2'-O-methylguanosine-3'-phosphate
  modified_base 15: mod_base = OTHER; note = 2'-O-methyluridine-3'-phosphate
  modified_base 16: mod_base = OTHER; note = 2'-O-methylguanosine-3'-phosphate
  modified_base 17: mod_base = OTHER; note = 2'-O-methyluridine-3'-phosphate
  modified_base 18: mod_base = OTHER; note = 2'-O-methyladenosine-3'-phosphate
  modified_base 19: mod_base = OTHER; note = 2'-O-methylguanosine-3'-phosphorothioate
  modified_base 20: mod_base = OTHER; note = 2'-O-methyladenosine-3'-phosphorothioate
  modified_base 21: mod_base = OTHER; note = 2'-O-methyladenosine
gaattgagtaatggtgtagaa

SEQ ID NO: 919 - RNA, 21 nt, synthetic construct
  source 1..21: mol_type = other RNA
  modified_base 1: mod_base = OTHER; note = 2'-O-methyluridine-3'-phosphorothioate
  modified_base 2: mod_base = OTHER; note = 2'-O-methyluridine-3'-phosphorothioate
  modified_base 3: mod_base = OTHER; note = 2'-O-methylguanosine-3'-phosphate
  modified_base 4: mod_base = OTHER; note = 2'-O-methyladenosine-3'-phosphate
  modified_base 5: mod_base = OTHER; note = 2'-O-methylguanosine-3'-phosphate
  modified_base 6: mod_base = OTHER; note = 2'-O-methyluridine-3'-phosphate
  modified_base 7: mod_base = OTHER; note = 2'-deoxy-2'-fluoroadenosine-3'-phosphate
  modified_base 8: mod_base = OTHER; note = 2'-O-methyladenosine-3'-phosphate
  modified_base 9: mod_base = OTHER; note = 2'-deoxy-2'-fluorouridine-3'-phosphate
  modified_base 10: mod_base = OTHER; note = 2'-deoxy-2'-fluoroguanosine-3'-phosphate
  modified_base 11: mod_base = OTHER; note = 2'-deoxy-2'-fluoroguanosine-3'-phosphate
  modified_base 12: mod_base = OTHER; note = 2'-O-methyluridine-3'-phosphate
  modified_base 13: mod_base = OTHER; note = 2'-O-methylguanosine-3'-phosphate
  modified_base 14: mod_base = OTHER; note = 2'-O-methyluridine-3'-phosphate
  modified_base 15: mod_base = OTHER; note = 2'-O-methyladenosine-3'-phosphate
  modified_base 16: mod_base = OTHER; note = 2'-O-methylguanosine-3'-phosphate
  modified_base 17: mod_base = OTHER; note = 2'-O-methyladenosine-3'-phosphate
  modified_base 18: mod_base = OTHER; note = 2'-O-methyladenosine-3'-phosphate
  modified_base 19: mod_base = OTHER; note = 2'-O-methylcytidine-3'-phosphorothioate
  modified_base 20: mod_base = OTHER; note = 2'-O-methyladenosine-3'-phosphorothioate
  modified_base 21: mod_base = OTHER; note = 2'-O-methyladenosine
ttgagtaatggtgtagaacaa

SEQ ID NO: 920 - RNA, 21 nt, synthetic construct
  source 1..21: mol_type = other RNA
  modified_base 1: mod_base = OTHER; note = 2'-O-methylguanosine-3'-phosphorothioate
  modified_base 2: mod_base = OTHER; note = 2'-O-methyladenosine-3'-phosphorothioate
  modified_base 3: mod_base = OTHER; note = 2'-O-methylguanosine-3'-phosphate
  modified_base 4: mod_base = OTHER; note = 2'-O-methyluridine-3'-phosphate
  modified_base 5: mod_base = OTHER; note = 2'-O-methyladenosine-3'-phosphate
  modified_base 6: mod_base = OTHER; note = 2'-O-methyladenosine-3'-phosphate
  modified_base 7: mod_base = OTHER; note = 2'-deoxy-2'-fluorouridine-3'-phosphate
  modified_base 8: mod_base = OTHER; note = 2'-O-methylguanosine-3'-phosphate
  modified_base 9: mod_base = OTHER; note = 2'-deoxy-2'-fluoroguanosine-3'-phosphate
  modified_base 10: mod_base = OTHER; note = 2'-deoxy-2'-fluorouridine-3'-phosphate
  modified_base 11: mod_base = OTHER; note = 2'-deoxy-2'-fluoroguanosine-3'-phosphate
  modified_base 12: mod_base = OTHER; note = 2'-O-methyluridine-3'-phosphate
  modified_base 13: mod_base = OTHER; note = 2'-O-methyladenosine-3'-phosphate
  modified_base 14: mod_base = OTHER; note = 2'-O-methylguanosine-3'-phosphate
  modified_base 15: mod_base = OTHER; note = 2'-O-methyladenosine-3'-phosphate
  modified_base 16: mod_base = OTHER; note = 2'-O-methyladenosine-3'-phosphate
  modified_base 17: mod_base = OTHER; note = 2'-O-methylcytidine-3'-phosphate
  modified_base 18: mod_base = OTHER; note = 2'-O-methyladenosine-3'-phosphate
  modified_base 19: mod_base = OTHER; note = 2'-O-methylcytidine-3'-phosphorothioate
  modified_base 20: mod_base = OTHER; note = 2'-O-methyluridine-3'-phosphorothioate
  modified_base 21: mod_base = OTHER; note = 2'-O-methyladenosine
gagtaatggtgtagaacacta

SEQ ID NO: 921 - RNA, 21 nt, synthetic construct
  source 1..21: mol_type = other RNA
  modified_base 1: mod_base = OTHER; note = 2'-O-methyladenosine-3'-phosphorothioate
  modified_base 2: mod_base = OTHER; note = 2'-O-methylguanosine-3'-phosphorothioate
  modified_base 3: mod_base = OTHER; note = 2'-O-methyluridine-3'-phosphate
  modified_base 4: mod_base = OTHER; note = 2'-O-methyladenosine-3'-phosphate
  modified_base 5: mod_base = OTHER; note = 2'-O-methyladenosine-3'-phosphate
  modified_base 6: mod_base = OTHER; note = 2'-O-methyluridine-3'-phosphate
  modified_base 7: mod_base = OTHER; note = 2'-deoxy-2'-fluoroguanosine-3'-phosphate
  modified_base 8: mod_base = OTHER; note = 2'-O-methylguanosine-3'-phosphate
  modified_base 9: mod_base = OTHER; note = 2'-deoxy-2'-fluorouridine-3'-phosphate
  modified_base 10: mod_base = OTHER; note = 2'-deoxy-2'-fluoroguanosine-3'-phosphate
  modified_base 11: mod_base = OTHER; note = 2'-deoxy-2'-fluorouridine-3'-phosphate
  modified_base 12: mod_base = OTHER; note = 2'-O-methyladenosine-3'-phosphate
  modified_base 13: mod_base = OTHER; note = 2'-O-methylguanosine-3'-phosphate
  modified_base 14: mod_base = OTHER; note = 2'-O-methyladenosine-3'-phosphate
  modified_base 15: mod_base = OTHER; note = 2'-O-methyladenosine-3'-phosphate
  modified_base 16: mod_base = OTHER; note = 2'-O-methylcytidine-3'-phosphate
  modified_base 17: mod_base = OTHER; note = 2'-O-methyladenosine-3'-phosphate
  modified_base 18: mod_base = OTHER; note = 2'-O-methylcytidine-3'-phosphate
  modified_base 19: mod_base = OTHER; note = 2'-O-methyluridine-3'-phosphorothioate
  modified_base 20: mod_base = OTHER; note = 2'-O-methyladenosine-3'-phosphorothioate
  modified_base 21: mod_base = OTHER; note = 2'-O-methyladenosine
agtaatggtgtagaacactaa

SEQ ID NO: 922 - RNA, 21 nt, synthetic construct
  source 1..21: mol_type = other RNA
  modified_base 1: mod_base = OTHER; note = 2'-O-methyluridine-3'-phosphorothioate
  modified_base 2: mod_base = OTHER; note = 2'-O-methyladenosine-3'-phosphorothioate
  modified_base 3: mod_base = OTHER; note = 2'-O-methyladenosine-3'-phosphate
  modified_base 4: mod_base = OTHER; note = 2'-O-methyluridine-3'-phosphate
  modified_base 5: mod_base = OTHER; note = 2'-O-methylguanosine-3'-phosphate
  modified_base 6: mod_base = OTHER; note = 2'-O-methylguanosine-3'-phosphate
  modified_base 7: mod_base = OTHER; note = 2'-deoxy-2'-fluorouridine-3'-phosphate
  modified_base 8: mod_base = OTHER; note = 2'-O-methylguanosine-3'-phosphate
  modified_base 9: mod_base = OTHER; note = 2'-deoxy-2'-fluorouridine-3'-phosphate
  modified_base 10: mod_base = OTHER; note = 2'-deoxy-2'-fluoroadenosine-3'-phosphate
  modified_base 11: mod_base = OTHER; note = 2'-deoxy-2'-fluoroguanosine-3'-phosphate
  modified_base 12: mod_base = OTHER; note = 2'-O-methyladenosine-3'-phosphate
  modified_base 13: mod_base = OTHER; note = 2'-O-methyladenosine-3'-phosphate
  modified_base 14: mod_base = OTHER; note = 2'-O-methylcytidine-3'-phosphate
  modified_base 15: mod_base = OTHER; note = 2'-O-methyladenosine-3'-phosphate
  modified_base 16: mod_base = OTHER; note = 2'-O-methylcytidine-3'-phosphate
  modified_base 17: mod_base = OTHER; note = 2'-O-methyluridine-3'-phosphate
  modified_base 18: mod_base = OTHER; note = 2'-O-methyladenosine-3'-phosphate
  modified_base 19: mod_base = OTHER; note = 2'-O-methyladenosine-3'-phosphorothioate
  modified_base 20: mod_base = OTHER; note = 2'-O-methyluridine-3'-phosphorothioate
  modified_base 21: mod_base = OTHER; note = 2'-O-methyladenosine
taatggtgtagaacactaata

SEQ ID NO: 923 - RNA, 21 nt, synthetic construct
  source 1..21: mol_type = other RNA
  modified_base 1: mod_base = OTHER; note = 2'-O-methyladenosine-3'-phosphorothioate
  modified_base 2: mod_base = OTHER; note = 2'-O-methyluridine-3'-phosphorothioate
  modified_base 3: mod_base = OTHER; note = 2'-O-methylguanosine-3'-phosphate
  modified_base 4: mod_base = OTHER; note = 2'-O-methylguanosine-3'-phosphate
  modified_base 5: mod_base = OTHER; note = 2'-O-methyluridine-3'-phosphate
  modified_base 6: mod_base = OTHER; note = 2'-O-methylguanosine-3'-phosphate
  modified_base 7: mod_base = OTHER; note = 2'-O-methyluridine-3'-phosphate
  modified_base 8: mod_base = OTHER; note = 2'-O-methyladenosine-3'-phosphate
  modified_base 9: mod_base = OTHER; note = 2'-deoxy-2'-fluoroguanosine-3'-phosphate
  modified_base 10: mod_base = OTHER; note = 2'-deoxy-2'-fluoroadenosine-3'-phosphate
  modified_base 11: mod_base = OTHER; note = 2'-deoxy-2'-fluoroadenosine-3'-phosphate
  modified_base 12: mod_base = OTHER; note = 2'-O-methylcytidine-3'-phosphate
  modified_base 13: mod_base = OTHER; note = 2'-O-methyladenosine-3'-phosphate
  modified_base 14: mod_base = OTHER; note = 2'-O-methylcytidine-3'-phosphate
  modified_base 15: mod_base = OTHER; note = 2'-O-methyluridine-3'-phosphate
  modified_base 16: mod_base = OTHER; note = 2'-O-methyladenosine-3'-phosphate
  modified_base 17: mod_base = OTHER; note = 2'-O-methyladenosine-3'-phosphate
  modified_base 18: mod_base = OTHER; note = 2'-O-methyluridine-3'-phosphate
  modified_base 19: mod_base = OTHER; note = 2'-O-methyluridine-3'-phosphorothioate
  modified_base 20: mod_base = OTHER; note = 2'-O-methylcytidine-3'-phosphorothioate
  modified_base 21: mod_base = OTHER; note = 2'-O-methyladenosine
atggtgtagaacactaattca

SEQ ID NO: 924 - RNA, 21 nt, synthetic construct
  source 1..21: mol_type = other RNA
  modified_base 1: mod_base = OTHER; note = 2'-O-methyluridine-3'-phosphorothioate
  modified_base 2: mod_base = OTHER; note = 2'-O-methylguanosine-3'-phosphorothioate
  modified_base 3: mod_base = OTHER; note = 2'-O-methylguanosine-3'-phosphate
  modified_base 4: mod_base = OTHER; note = 2'-O-methyluridine-3'-phosphate
  modified_base 5: mod_base = OTHER; note = 2'-O-methylguanosine-3'-phosphate
  modified_base 6: mod_base = OTHER; note = 2'-O-methyluridine-3'-phosphate
  modified_base 7: mod_base = OTHER; note = 2'-O-methyladenosine-3'-phosphate
  modified_base 8: mod_base = OTHER; note = 2'-O-methylguanosine-3'-phosphate
  modified_base 9: mod_base = OTHER; note = 2'-deoxy-2'-fluoroadenosine-3'-phosphate
  modified_base 10: mod_base = OTHER; note = 2'-deoxy-2'-fluoroadenosine-3'-phosphate
  modified_base 11: mod_base = OTHER; note = 2'-deoxy-2'-fluorocytidine-3'-phosphate
  modified_base 12: mod_base = OTHER; note = 2'-O-methyladenosine-3'-phosphate
  modified_base 13: mod_base = OTHER; note = 2'-O-methylcytidine-3'-phosphate
  modified_base 14: mod_base = OTHER; note = 2'-O-methyluridine-3'-phosphate
  modified_base 15: mod_base = OTHER; note = 2'-O-methyladenosine-3'-phosphate
  modified_base 16: mod_base = OTHER; note = 2'-O-methyladenosine-3'-phosphate
  modified_base 17: mod_base = OTHER; note = 2'-O-methyluridine-3'-phosphate
  modified_base 18: mod_base = OTHER; note = 2'-O-methyluridine-3'-phosphate
  modified_base 19: mod_base = OTHER; note = 2'-O-methylcytidine-3'-phosphorothioate
  modified_base 20: mod_base = OTHER; note = 2'-O-methyladenosine-3'-phosphorothioate
  modified_base 21: mod_base = OTHER; note = 2'-O-methyladenosine
tggtgtagaacactaattcaa

SEQ ID NO: 925 - RNA, 21 nt, synthetic construct
  source 1..21: mol_type = other RNA
  modified_base 1: mod_base = OTHER; note = 2'-O-methylguanosine-3'-phosphorothioate
  modified_base 2: mod_base = OTHER; note = 2'-O-methylguanosine-3'-phosphorothioate
  modified_base 3: mod_base = OTHER; note = 2'-O-methyluridine-3'-phosphate
  modified_base 4: mod_base = OTHER; note = 2'-O-methylguanosine-3'-phosphate
  modified_base 5: mod_base = OTHER; note = 2'-O-methyluridine-3'-phosphate
  modified_base 6: mod_base = OTHER; note = 2'-O-methyladenosine-3'-phosphate
  modified_base 7: mod_base = OTHER; note = 2'-O-methylguanosine-3'-phosphate
  modified_base 8: mod_base = OTHER; note = 2'-O-methyladenosine-3'-phosphate
  modified_base 9: mod_base = OTHER; note = 2'-deoxy-2'-fluoroadenosine-3'-phosphate
  modified_base 10: mod_base = OTHER; note = 2'-deoxy-2'-fluorocytidine-3'-phosphate
  modified_base 11: mod_base = OTHER; note = 2'-deoxy-2'-fluoroadenosine-3'-phosphate
  modified_base 12: mod_base = OTHER; note = 2'-O-methylcytidine-3'-phosphate
  modified_base 13: mod_base = OTHER; note = 2'-O-methyluridine-3'-phosphate
  modified_base 14: mod_base = OTHER; note = 2'-O-methyladenosine-3'-phosphate
  modified_base 15: mod_base = OTHER; note = 2'-O-methyladenosine-3'-phosphate
  modified_base 16: mod_base = OTHER; note = 2'-O-methyluridine-3'-phosphate
  modified_base 17: mod_base = OTHER; note = 2'-O-methyluridine-3'-phosphate
  modified_base 18: mod_base = OTHER; note = 2'-O-methylcytidine-3'-phosphate
  modified_base 19: mod_base = OTHER; note = 2'-O-methyladenosine-3'-phosphorothioate
  modified_base 20: mod_base = OTHER; note = 2'-O-methyluridine-3'-phosphorothioate
  modified_base 21: mod_base = OTHER; note = 2'-O-methyladenosine
ggtgtagaacactaattcata

SEQ ID NO: 926 - RNA, 21 nt, synthetic construct
  source 1..21: mol_type = other RNA
  modified_base 1: mod_base = OTHER; note = 2'-O-methylguanosine-3'-phosphorothioate
  modified_base 2: mod_base = OTHER; note = 2'-O-methyluridine-3'-phosphorothioate
  modified_base 3: mod_base = OTHER; note = 2'-O-methylguanosine-3'-phosphate
  modified_base 4: mod_base = OTHER; note = 2'-O-methyluridine-3'-phosphate
  modified_base 5: mod_base = OTHER; note = 2'-O-methyladenosine-3'-phosphate
  modified_base 6: mod_base = OTHER; note = 2'-O-methylguanosine-3'-phosphate
  modified_base 7: mod_base = OTHER; note = 2'-deoxy-2'-fluoroadenosine-3'-phosphate
  modified_base 8: mod_base = OTHER; note = 2'-O-methyladenosine-3'-phosphate
  modified_base 9: mod_base = OTHER; note = 2'-deoxy-2'-fluorocytidine-3'-phosphate
  modified_base 10: mod_base = OTHER; note = 2'-deoxy-2'-fluoroadenosine-3'-phosphate
  modified_base 11: mod_base = OTHER; note = 2'-deoxy-2'-fluorocytidine-3'-phosphate
  modified_base 12: mod_base = OTHER; note = 2'-O-methyluridine-3'-phosphate
  modified_base 13: mod_base = OTHER; note = 2'-O-methyladenosine-3'-phosphate
  modified_base 14: mod_base = OTHER; note = 2'-O-methyladenosine-3'-phosphate
  modified_base 15: mod_base = OTHER; note = 2'-O-methyluridine-3'-phosphate
  modified_base 16: mod_base = OTHER; note = 2'-O-methyluridine-3'-phosphate
  modified_base 17: mod_base = OTHER; note = 2'-O-methylcytidine-3'-phosphate
  modified_base 18: mod_base = OTHER; note = 2'-O-methyladenosine-3'-phosphate
  modified_base 19: mod_base = OTHER; note = 2'-O-methyluridine-3'-phosphorothioate
  modified_base 20: mod_base = OTHER; note = 2'-O-methyladenosine-3'-phosphorothioate
  modified_base 21: mod_base = OTHER; note = 2'-O-methyladenosine
gtgtagaacactaattcataa

SEQ ID NO: 927 - RNA, 21 nt, synthetic construct
  source 1..21: mol_type = other RNA
  modified_base 1: mod_base = OTHER; note = 2'-O-methyluridine-3'-phosphorothioate
  modified_base 2: mod_base = OTHER; note = 2'-O-methylguanosine-3'-phosphorothioate
  modified_base 3: mod_base = OTHER; note = 2'-O-methyluridine-3'-phosphate
  modified_base 4: mod_base = OTHER; note = 2'-O-methyladenosine-3'-phosphate
  modified_base 5: mod_base = OTHER; note = 2'-O-methylguanosine-3'-phosphate
  modified_base 6: mod_base = OTHER; note = 2'-O-methyladenosine-3'-phosphate
  modified_base 7: mod_base = OTHER; note = 2'-deoxy-2'-fluoroadenosine-3'-phosphate
  modified_base 8: mod_base = OTHER; note = 2'-O-methylcytidine-3'-phosphate
  modified_base 9: mod_base = OTHER; note = 2'-deoxy-2'-fluoroadenosine-3'-phosphate
  modified_base 10: mod_base = OTHER; note = 2'-deoxy-2'-fluorocytidine-3'-phosphate
  modified_base 11: mod_base = OTHER; note = 2'-deoxy-2'-fluorouridine-3'-phosphate
  modified_base 12: mod_base = OTHER; note = 2'-O-methyladenosine-3'-phosphate
  modified_base 13: mod_base = OTHER; note = 2'-O-methyladenosine-3'-phosphate
  modified_base 14: mod_base = OTHER; note = 2'-O-methyluridine-3'-phosphate
  modified_base 15: mod_base = OTHER; note = 2'-O-methyluridine-3'-phosphate
  modified_base 16: mod_base = OTHER; note = 2'-O-methylcytidine-3'-phosphate
  modified_base 17: mod_base = OTHER; note = 2'-O-methyladenosine-3'-phosphate
  modified_base 18: mod_base = OTHER; note = 2'-O-methyluridine-3'-phosphate
  modified_base 19: mod_base = OTHER; note = 2'-O-methyladenosine-3'-phosphorothioate
  modified_base 20: mod_base = OTHER; note = 2'-O-methyladenosine-3'-phosphorothioate
  modified_base 21: mod_base = OTHER; note = 2'-O-methyladenosine
tgtagaacactaattcataaa

SEQ ID NO: 928 - RNA, 21 nt, synthetic construct
  source 1..21: mol_type = other RNA
  modified_base 1: mod_base = OTHER; note = 2'-O-methylguanosine-3'-phosphorothioate
  modified_base 2: mod_base = OTHER; note = 2'-O-methyluridine-3'-phosphorothioate
  modified_base 3: mod_base = OTHER; note = 2'-O-methyladenosine-3'-phosphate
  modified_base 4: mod_base = OTHER; note = 2'-O-methylguanosine-3'-phosphate
  modified_base 5: mod_base = OTHER; note = 2'-O-methyladenosine-3'-phosphate
  modified_base 6: mod_base = OTHER; note = 2'-O-methyladenosine-3'-phosphate
  modified_base 7: mod_base = OTHER; note = 2'-O-methylcytidine-3'-phosphate
  modified_base 8: mod_base = OTHER; note = 2'-O-methyladenosine-3'-phosphate
  modified_base 9: mod_base = OTHER; note = 2'-deoxy-2'-fluorocytidine-3'-phosphate
  modified_base 10: mod_base = OTHER; note = 2'-deoxy-2'-fluorouridine-3'-phosphate
  modified_base 11: mod_base = OTHER; note = 2'-deoxy-2'-fluoroadenosine-3'-phosphate
  modified_base 12: mod_base = OTHER; note = 2'-O-methyladenosine-3'-phosphate
  modified_base 13: mod_base = OTHER; note = 2'-O-methyluridine-3'-phosphate
  modified_base 14: mod_base = OTHER; note = 2'-O-methyluridine-3'-phosphate
  modified_base 15: mod_base = OTHER; note = 2'-O-methylcytidine-3'-phosphate
  modified_base 16: mod_base = OTHER; note = 2'-O-methyladenosine-3'-phosphate
  modified_base 17: mod_base = OTHER; note = 2'-O-methyluridine-3'-phosphate
  modified_base 18: mod_base = OTHER; note = 2'-O-methyladenosine-3'-phosphate
  modified_base 19: mod_base = OTHER; note = 2'-O-methyladenosine-3'-phosphorothioate
  modified_base 20: mod_base = OTHER; note = 2'-O-methyluridine-3'-phosphorothioate
  modified_base 21: mod_base = OTHER; note = 2'-O-methyladenosine
gtagaacactaattcataata

SEQ ID NO: 929 - RNA, 21 nt, synthetic construct
  source 1..21: mol_type = other RNA
  modified_base 1: mod_base = OTHER; note = 2'-O-methyluridine-3'-phosphorothioate
  modified_base 2: mod_base = OTHER; note = 2'-O-methyladenosine-3'-phosphorothioate
  modified_base 3: mod_base = OTHER; note = 2'-O-methylguanosine-3'-phosphate
  modified_base 4: mod_base = OTHER; note = 2'-O-methyladenosine-3'-phosphate
  modified_base 5: mod_base = OTHER; note = 2'-O-methyladenosine-3'-phosphate
  modified_base 6: mod_base = OTHER; note = 2'-O-methylcytidine-3'-phosphate
  modified_base 7: mod_base = OTHER; note = 2'-O-methyladenosine-3'-phosphate
  modified_base 8: mod_base = OTHER; note = 2'-O-methylcytidine-3'-phosphate
  modified_base 9: mod_base = OTHER; note = 2'-deoxy-2'-fluorouridine-3'-phosphate
  modified_base 10: mod_base = OTHER; note = 2'-deoxy-2'-fluoroadenosine-3'-phosphate
  modified_base 11: mod_base = OTHER; note = 2'-deoxy-2'-fluoroadenosine-3'-phosphate
  modified_base 12: mod_base = OTHER; note = 2'-O-methyluridine-3'-phosphate
  modified_base 13: mod_base = OTHER; note = 2'-O-methyluridine-3'-phosphate
  modified_base 14: mod_base = OTHER; note = 2'-O-methylcytidine-3'-phosphate
  modified_base 15: mod_base = OTHER; note = 2'-O-methyladenosine-3'-phosphate
  modified_base 16: mod_base = OTHER; note = 2'-O-methyluridine-3'-phosphate
  modified_base 17: mod_base = OTHER; note = 2'-O-methyladenosine-3'-phosphate
  modified_base 18: mod_base = OTHER; note = 2'-O-methyladenosine-3'-phosphate
  modified_base 19: mod_base = OTHER; note = 2'-O-methyluridine-3'-phosphorothioate
  modified_base 20: mod_base = OTHER; note = 2'-O-methylcytidine-3'-phosphorothioate
  modified_base 21: mod_base = OTHER; note = 2'-O-methyladenosine
tagaacactaattcataatca

SEQ ID NO: 930 - RNA, 21 nt, synthetic construct
  source 1..21: mol_type = other RNA
  modified_base 1: mod_base = OTHER; note = 2'-O-methyladenosine-3'-phosphorothioate
  modified_base 2: mod_base = OTHER; note = 2'-O-methylguanosine-3'-phosphorothioate
  modified_base 3: mod_base = OTHER; note = 2'-O-methyladenosine-3'-phosphate
  modified_base 4: mod_base = OTHER; note = 2'-O-methyladenosine-3'-phosphate
  modified_base 5: mod_base = OTHER; note = 2'-O-methylcytidine-3'-phosphate
  modified_base 6: mod_base = OTHER; note = 2'-O-methyladenosine-3'-phosphate
  modified_base 7: mod_base = OTHER; note = 2'-O-methylcytidine-3'-phosphate
  modified_base 8: mod_base = OTHER; note = 2'-O-methyluridine-3'-phosphate
  modified_base 9: mod_base = OTHER; note = 2'-deoxy-2'-fluoroadenosine-3'-phosphate
  modified_base 10: mod_base = OTHER; note = 2'-deoxy-2'-fluoroadenosine-3'-phosphate
  modified_base 11: mod_base = OTHER; note = 2'-deoxy-2'-fluorouridine-3'-phosphate
  modified_base 12: mod_base = OTHER; note = 2'-O-methyluridine-3'-phosphate
  modified_base 13: mod_base = OTHER; note = 2'-O-methylcytidine-3'-phosphate
  modified_base 14: mod_base = OTHER; note = 2'-O-methyladenosine-3'-phosphate
  modified_base 15: mod_base = OTHER; note = 2'-O-methyluridine-3'-phosphate
  modified_base 16: mod_base = OTHER; note = 2'-O-methyladenosine-3'-phosphate
  modified_base 17: mod_base = OTHER; note = 2'-O-methyladenosine-3'-phosphate
  modified_base 18: mod_base = OTHER; note = 2'-O-methyluridine-3'-phosphate
  modified_base 19: mod_base = OTHER; note = 2'-O-methylcytidine-3'-phosphorothioate
  modified_base 20: mod_base = OTHER; note = 2'-O-methyladenosine-3'-phosphorothioate
  modified_base 21: mod_base = OTHER; note = 2'-O-methyladenosine
agaacactaattcataatcaa

SEQ ID NO: 931 - RNA, 21 nt, synthetic construct
  source 1..21: mol_type = other RNA
  modified_base 1: mod_base = OTHER; note = 2'-O-methyladenosine-3'-phosphorothioate
  modified_base 2: mod_base = OTHER; note = 2'-O-methylguanosine-3'-phosphorothioate
  modified_base 3: mod_base = OTHER; note = 2'-O-methyladenosine-3'-phosphate
  modified_base 4: mod_base = OTHER; note = 2'-O-methyladenosine-3'-phosphate
  modified_base 5: mod_base = OTHER; note = 2'-O-methylcytidine-3'-phosphate
  modified_base 6: mod_base = OTHER; note = 2'-O-methyladenosine-3'-phosphate
  modified_base 7: mod_base = OTHER; note = 2'-deoxy-2'-fluorocytidine-3'-phosphate
  modified_base 8: mod_base = OTHER; note = 2'-O-methyluridine-3'-phosphate
  modified_base 9: mod_base = OTHER; note = 2'-deoxy-2'-fluoroadenosine-3'-phosphate
  modified_base 10: mod_base = OTHER; note = 2'-deoxy-2'-fluoroadenosine-3'-phosphate
  modified_base 11: mod_base = OTHER; note = 2'-deoxy-2'-fluorouridine-3'-phosphate
  modified_base 12: mod_base = OTHER; note = 2'-O-methyluridine-3'-phosphate
  modified_base 13: mod_base = OTHER; note = 2'-O-methylcytidine-3'-phosphate
  modified_base 14: mod_base = OTHER; note = 2'-O-methyladenosine-3'-phosphate
  modified_base 15: mod_base = OTHER; note = 2'-O-methyluridine-3'-phosphate
  modified_base 16: mod_base = OTHER; note = 2'-O-methyladenosine-3'-phosphate
  modified_base 17: mod_base = OTHER; note = 2'-O-methyladenosine-3'-phosphate
  modified_base 18: mod_base = OTHER; note = 2'-O-methyluridine-3'-phosphate
  modified_base 19: mod_base = OTHER; note = 2'-O-methylcytidine-3'-phosphorothioate
  modified_base 20: mod_base = OTHER; note = 2'-O-methyladenosine-3'-phosphorothioate
  modified_base 21: mod_base = OTHER; note = 2'-O-methyladenosine
agaacactaattcataatcaa

SEQ ID NO: 932 - RNA, 21 nt, synthetic construct
  source 1..21: mol_type = other RNA
  modified_base 1: mod_base = OTHER; note = 2'-O-methylguanosine-3'-phosphorothioate
  modified_base 2: mod_base = OTHER; note = 2'-O-methyladenosine-3'-phosphorothioate
  modified_base 3: mod_base = OTHER; note = 2'-O-methyladenosine-3'-phosphate
  modified_base 4: mod_base = OTHER; note = 2'-O-methylcytidine-3'-phosphate
  modified_base 5: mod_base = OTHER; note = 2'-O-methyladenosine-3'-phosphate
  modified_base 6: mod_base = OTHER; note = 2'-O-methylcytidine-3'-phosphate
  modified_base 7: mod_base = OTHER; note = 2'-O-methyluridine-3'-phosphate
  modified_base 8: mod_base = OTHER; note = 2'-O-methyladenosine-3'-phosphate
  modified_base 9: mod_base = OTHER; note = 2'-deoxy-2'-fluoroadenosine-3'-phosphate
  modified_base 10: mod_base = OTHER; note = 2'-deoxy-2'-fluorouridine-3'-phosphate
  modified_base 11: mod_base = OTHER; note = 2'-deoxy-2'-fluorouridine-3'-phosphate
  modified_base 12: mod_base = OTHER; note = 2'-O-methylcytidine-3'-phosphate
  modified_base 13: mod_base = OTHER; note = 2'-O-methyladenosine-3'-phosphate
  modified_base 14: mod_base = OTHER; note = 2'-O-methyluridine-3'-phosphate
  modified_base 15: mod_base = OTHER; note = 2'-O-methyladenosine-3'-phosphate
  modified_base 16: mod_base = OTHER; note = 2'-O-methyladenosine-3'-phosphate
  modified_base 17: mod_base = OTHER; note = 2'-O-methyluridine-3'-phosphate
  modified_base 18: mod_base = OTHER; note = 2'-O-methylcytidine-3'-phosphate
  modified_base 19: mod_base = OTHER; note = 2'-O-methyladenosine-3'-phosphorothioate
  modified_base 20: mod_base = OTHER; note = 2'-O-methylcytidine-3'-phosphorothioate
  modified_base 21: mod_base = OTHER; note = 2'-O-methyladenosine
gaacactaattcataatcaca

SEQ ID NO: 933 - RNA, 21 nt, synthetic construct
  source 1..21: mol_type = other RNA
  modified_base 1: mod_base = OTHER; note = 2'-O-methyladenosine-3'-phosphorothioate
  modified_base 2: mod_base = OTHER; note = 2'-O-methyladenosine-3'-phosphorothioate
  modified_base 3: mod_base = OTHER; note = 2'-O-methylcytidine-3'-phosphate
  modified_base 4: mod_base = OTHER; note = 2'-O-methyladenosine-3'-phosphate
  modified_base 5: mod_base = OTHER; note = 2'-O-methylcytidine-3'-phosphate
  modified_base 6: mod_base = OTHER; note = 2'-O-methyluridine-3'-phosphate
  modified_base 7: mod_base = OTHER; note = 2'-deoxy-2'-fluoroadenosine-3'-phosphate
  modified_base 8: mod_base = OTHER; note = 2'-O-methyladenosine-3'-phosphate
  modified_base 9: mod_base = OTHER; note = 2'-deoxy-2'-fluorouridine-3'-phosphate
  modified_base 10: mod_base = OTHER; note = 2'-deoxy-2'-fluorouridine-3'-phosphate
  modified_base 11: mod_base = OTHER; note = 2'-deoxy-2'-fluorocytidine-3'-phosphate
  modified_base 12: mod_base = OTHER; note = 2'-O-methyladenosine-3'-phosphate
  modified_base 13: mod_base = OTHER; note = 2'-O-methyluridine-3'-phosphate
  modified_base 14: mod_base = OTHER; note = 2'-O-methyladenosine-3'-phosphate
  modified_base 15: mod_base = OTHER; note = 2'-O-methyladenosine-3'-phosphate
  modified_base 16: mod_base = OTHER; note = 2'-O-methyluridine-3'-phosphate
  modified_base 17: mod_base = OTHER; note = 2'-O-methylcytidine-3'-phosphate
  modified_base 18: mod_base = OTHER; note = 2'-O-methyladenosine-3'-phosphate
  modified_base 19: mod_base = OTHER; note = 2'-O-methylcytidine-3'-phosphorothioate
  modified_base 20: mod_base = OTHER; note = 2'-O-methyluridine-3'-phosphorothioate
  modified_base 21: mod_base = OTHER; note = 2'-O-methyladenosine
aacactaattcataatcacta

SEQ ID NO: 934 - RNA, 21 nt, synthetic construct
  source 1..21: mol_type = other RNA
  modified_base 1: mod_base = OTHER; note = 2'-O-methyladenosine-3'-phosphorothioate
  modified_base 2: mod_base = OTHER; note = 2'-O-methyluridine-3'-phosphorothioate
  modified_base 3: mod_base = OTHER; note = 2'-O-methylguanosine-3'-phosphate
  modified_base 4: mod_base = OTHER; note = 2'-O-methylguanosine-3'-phosphate
  modified_base 5: mod_base = OTHER; note = 2'-O-methyluridine-3'-phosphate
  modified_base 6: mod_base = OTHER; note = 2'-O-methylcytidine-3'-phosphate
  modified_base 7: mod_base = OTHER; note = 2'-O-methylcytidine-3'-phosphate
  modified_base 8: mod_base = OTHER; note = 2'-O-methyladenosine-3'-phosphate
  modified_base 9: mod_base = OTHER; note = 2'-deoxy-2'-fluoroadenosine-3'-phosphate
  modified_base 10: mod_base = OTHER; note = 2'-deoxy-2'-fluorouridine-3'-phosphate
  modified_base 11: mod_base = OTHER; note = 2'-deoxy-2'-fluorouridine-3'-phosphate
  modified_base 12: mod_base = OTHER; note = 2'-O-methyladenosine-3'-phosphate
  modified_base 13: mod_base = OTHER; note = 2'-O-methylguanosine-3'-phosphate
  modified_base 14: mod_base = OTHER; note = 2'-O-methyluridine-3'-phosphate
  modified_base 15: mod_base = OTHER; note = 2'-O-methyluridine-3'-phosphate
  modified_base 16: mod_base = OTHER; note = 2'-O-methyluridine-3'-phosphate
  modified_base 17: mod_base = OTHER; note = 2'-O-methylcytidine-3'-phosphate
  modified_base 18: mod_base = OTHER; note = 2'-O-methylcytidine-3'-phosphate
  modified_base 19: mod_base = OTHER; note = 2'-O-methyluridine-3'-phosphorothioate
  modified_base 20: mod_base = OTHER; note = 2'-O-methyluridine-3'-phosphorothioate
  modified_base 21: mod_base = OTHER; note = 2'-O-methyladenosine
atggtccaattagtttcctta

SEQ ID NO: 935 - RNA, 21 nt, synthetic construct
  source 1..21: mol_type = other RNA
  modified_base 1: mod_base = OTHER; note = 2'-O-methyluridine-3'-phosphorothioate
  modified_base 2: mod_base = OTHER; note = 2'-O-methyluridine-3'-phosphorothioate
  modified_base 3: mod_base = OTHER; note = 2'-O-methyluridine-3'-phosphate
  modified_base 4: mod_base = OTHER; note = 2'-O-methylguanosine-3'-phosphate
  modified_base 5: mod_base = OTHER; note = 2'-O-methylguanosine-3'-phosphate
  modified_base 6: mod_base = OTHER; note = 2'-O-methylguanosine-3'-phosphate
  modified_base 7: mod_base = OTHER; note = 2'-O-methyladenosine-3'-phosphate
  modified_base 8: mod_base = OTHER; note = 2'-O-methyluridine-3'-phosphate
  modified_base 9: mod_base = OTHER; note = 2'-deoxy-2'-fluoroadenosine-3'-phosphate
  modified_base 10: mod_base = OTHER; note = 2'-deoxy-2'-fluorouridine-3'-phosphate
  modified_base 11: mod_base = OTHER; note = 2'-deoxy-2'-fluoroguanosine-3'-phosphate
  modified_base 12: mod_base = OTHER; note = 2'-O-methyluridine-3'-phosphate
  modified_base 13: mod_base = OTHER; note = 2'-O-methyladenosine-3'-phosphate
  modified_base 14: mod_base = OTHER; note = 2'-O-methyluridine-3'-phosphate
  modified_base 15: mod_base = OTHER; note = 2'-O-methylguanosine-3'-phosphate
  modified_base 16: mod_base = OTHER; note = 2'-O-methylguanosine-3'-phosphate
  modified_base 17: mod_base = OTHER; note = 2'-O-methylguanosine-3'-phosphate
  modified_base 18: mod_base = OTHER; note = 2'-O-methyluridine-3'-phosphate
  modified_base 19: mod_base = OTHER; note = 2'-O-methyladenosine-3'-phosphorothioate
  modified_base 20: mod_base = OTHER; note = 2'-O-methylguanosine-3'-phosphorothioate
  modified_base 21: mod_base = OTHER; note = 2'-O-methyladenosine
tttgggatatgtatgggtaga

SEQ ID NO: 936 - RNA, 21 nt, synthetic construct
  source 1..21: mol_type = other RNA
  modified_base 1: mod_base = OTHER; note = 2'-O-methyluridine-3'-phosphorothioate
  modified_base 2: mod_base = OTHER; note = 2'-O-methylguanosine-3'-phosphorothioate
  modified_base 3: mod_base = OTHER; note = 2'-O-methyluridine-3'-phosphate
  modified_base 4: mod_base = OTHER; note = 2'-O-methyladenosine-3'-phosphate
  modified_base 5: mod_base = OTHER; note = 2'-O-methyluridine-3'-phosphate
  modified_base 6: mod_base = OTHER; note = 2'-O-methylguanosine-3'-phosphate
  modified_base 7: mod_base = OTHER; note = 2'-deoxy-2'-fluoroguanosine-3'-phosphate
  modified_base 8: mod_base = OTHER; note = 2'-O-methylguanosine-3'-phosphate
  modified_base 9: mod_base = OTHER; note = 2'-deoxy-2'-fluorouridine-3'-phosphate
  modified_base 10: mod_base = OTHER; note = 2'-deoxy-2'-fluoroadenosine-3'-phosphate
  modified_base 11: mod_base = OTHER; note = 2'-deoxy-2'-fluoroguanosine-3'-phosphate
  modified_base 12: mod_base = OTHER; note = 2'-O-methylguanosine-3'-phosphate
  modified_base 13: mod_base = OTHER; note = 2'-O-methylguanosine-3'-phosphate
  modified_base 14: mod_base = OTHER; note = 2'-O-methyluridine-3'-phosphate
  modified_base 15: mod_base = OTHER; note = 2'-O-methyladenosine-3'-phosphate
  modified_base 16: mod_base = OTHER; note = 2'-O-methyladenosine-3'-phosphate
  modified_base 17: mod_base = OTHER; note = 2'-O-methyladenosine-3'-phosphate
  modified_base 18: mod_base = OTHER; note = 2'-O-methyluridine-3'-phosphate
  modified_base 19: mod_base = OTHER; note = 2'-O-methylcytidine-3'-phosphorothioate
  modified_base 20: mod_base = OTHER; note = 2'-O-methyladenosine-3'-phosphorothioate
  modified_base 21: mod_base = OTHER; note = 2'-O-methyladenosine
tgtatgggtagggtaaatcaa

SEQ ID NO: 937 - RNA, 21 nt, synthetic construct
  source 1..21: mol_type = other RNA
  modified_base 1: mod_base = OTHER; note = 2'-O-methyladenosine-3'-phosphorothioate
  modified_base 2: mod_base = OTHER; note = 2'-O-methyluridine-3'-phosphorothioate
  modified_base 3: mod_base = OTHER; note = 2'-O-methylguanosine-3'-phosphate
  modified_base 4: mod_base = OTHER; note = 2'-O-methylguanosine-3'-phosphate
  modified_base 5: mod_base = OTHER; note = 2'-O-methylguanosine-3'-phosphate
  modified_base 6: mod_base = OTHER; note = 2'-O-methyluridine-3'-phosphate
  modified_base 7: mod_base = OTHER; note = 2'-deoxy-2'-fluoroadenosine-3'-phosphate
  modified_base 8: mod_base = OTHER; note = 2'-O-methylguanosine-3'-phosphate
  modified_base 9: mod_base = OTHER; note = 2'-deoxy-2'-fluoroguanosine-3'-phosphate
  modified_base 10: mod_base = OTHER; note = 2'-deoxy-2'-fluoroguanosine-3'-phosphate
  modified_base 11: mod_base = OTHER; note = 2'-deoxy-2'-fluorouridine-3'-phosphate
  modified_base 12: mod_base = OTHER; note = 2'-O-methyladenosine-3'-phosphate
  modified_base 13: mod_base = OTHER; note = 2'-O-methyladenosine-3'-phosphate
  modified_base 14: mod_base = OTHER; note = 2'-O-methyladenosine-3'-phosphate
  modified_base 15: mod_base = OTHER; note = 2'-O-methyluridine-3'-phosphate
  modified_base 16: mod_base = OTHER; note = 2'-O-methylcytidine-3'-phosphate
  modified_base 17: mod_base = OTHER; note = 2'-O-methyladenosine-3'-phosphate
  modified_base 18: mod_base = OTHER; note = 2'-O-methylguanosine-3'-phosphate
  modified_base 19: mod_base = OTHER; note = 2'-O-methyluridine-3'-phosphorothioate
  modified_base 20: mod_base = OTHER; note = 2'-O-methyladenosine-3'-phosphorothioate
  modified_base 21: mod_base = OTHER; note = 2'-O-methyladenosine
atgggtagggtaaatcagtaa

SEQ ID NO: 938 - RNA, 21 nt, synthetic construct
  source 1..21: mol_type = other RNA
  modified_base 1: mod_base = OTHER; note = 2'-O-methylguanosine-3'-phosphorothioate
  modified_base 2: mod_base = OTHER; note = 2'-O-methyluridine-3'-phosphorothioate
  modified_base 3: mod_base = OTHER; note = 2'-O-methyladenosine-3'-phosphate
  modified_base 4: mod_base = OTHER; note = 2'-O-methylguanosine-3'-phosphate
  modified_base 5: mod_base = OTHER; note = 2'-O-methylguanosine-3'-phosphate
  modified_base 6: mod_base = OTHER; note = 2'-O-methylguanosine-3'-phosphate
  modified_base 7: mod_base = OTHER; note = 2'-O-methyluridine-3'-phosphate
  modified_base 8: mod_base = OTHER; note = 2'-O-methyladenosine-3'-phosphate
  modified_base 9: mod_base = OTHER; note = 2'-deoxy-2'-fluoroadenosine-3'-phosphate
  modified_base 10: mod_base = OTHER; note = 2'-deoxy-2'-fluoroadenosine-3'-phosphate
  modified_base 11: mod_base = OTHER; note = 2'-deoxy-2'-fluorouridine-3'-phosphate
  modified_base 12: mod_base = OTHER; note = 2'-O-methylcytidine-3'-phosphate
  modified_base 13: mod_base = OTHER; note = 2'-O-methyladenosine-3'-phosphate
  modified_base 14: mod_base = OTHER; note = 2'-O-methylguanosine-3'-phosphate
  modified_base 15: mod_base = OTHER; note = 2'-O-methyluridine-3'-phosphate
  modified_base 16: mod_base = OTHER; note = 2'-O-methyladenosine-3'-phosphate
  modified_base 17: mod_base = OTHER; note = 2'-O-methyladenosine-3'-phosphate
  modified_base 18: mod_base = OTHER; note = 2'-O-methylguanosine-3'-phosphate
  modified_base 19: mod_base = OTHER; note = 2'-O-methyladenosine-3'-phosphorothioate
  modified_base 20: mod_base = OTHER; note = 2'-O-methylguanosine-3'-phosphorothioate
  modified_base 21: mod_base = OTHER; note = 2'-O-methyladenosine
gtagggtaaatcagtaagaga

SEQ ID NO: 939 - RNA, 21 nt, synthetic construct
  source 1..21: mol_type = other RNA
  modified_base 1: mod_base = OTHER; note = 2'-O-methyladenosine-3'-phosphorothioate
  modified_base 2: mod_base = OTHER; note = 2'-O-methylguanosine-3'-phosphorothioate
  modified_base 3: mod_base = OTHER; note = 2'-O-methylguanosine-3'-phosphate
  modified_base 4: mod_base = OTHER; note = 2'-O-methylguanosine-3'-phosphate
  modified_base 5: mod_base = OTHER; note = 2'-O-methyluridine-3'-phosphate
  modified_base 6: mod_base = OTHER; note = 2'-O-methyladenosine-3'-phosphate
  modified_base 7: mod_base = OTHER; note = 2'-deoxy-2'-fluoroadenosine-3'-phosphate
  modified_base 8: mod_base = OTHER; note = 2'-O-methyladenosine-3'-phosphate
  modified_base 9: mod_base = OTHER; note = 2'-deoxy-2'-fluorouridine-3'-phosphate
  modified_base 10: mod_base = OTHER; note = 2'-deoxy-2'-fluorocytidine-3'-phosphate
  modified_base 11: mod_base = OTHER; note = 2'-deoxy-2'-fluoroadenosine-3'-phosphate
  modified_base 12: mod_base = OTHER; note = 2'-O-methylguanosine-3'-phosphate
  modified_base 13: mod_base = OTHER; note = 2'-O-methyluridine-3'-phosphate
  modified_base 14: mod_base = OTHER; note = 2'-O-methyladenosine-3'-phosphate
  modified_base 15: mod_base = OTHER; note = 2'-O-methyladenosine-3'-phosphate
  modified_base 16: mod_base = OTHER; note = 2'-O-methylguanosine-3'-phosphate
  modified_base 17: mod_base = OTHER; note = 2'-O-methyladenosine-3'-phosphate
  modified_base 18: mod_base = OTHER; note = 2'-O-methylguanosine-3'-phosphate
  modified_base 19: mod_base = OTHER; note = 2'-O-methylguanosine-3'-phosphorothioate
  modified_base 20: mod_base = OTHER; note = 2'-O-methyluridine-3'-phosphorothioate
  modified_base 21: mod_base = OTHER; note = 2'-O-methyladenosine
agggtaaatcagtaagaggta

SEQ ID NO: 940 - RNA, 21 nt, synthetic construct
  source 1..21: mol_type = other RNA
  modified_base 1: mod_base = OTHER; note = 2'-O-methylguanosine-3'-phosphorothioate
  modified_base 2: mod_base = OTHER; note = 2'-O-methylguanosine-3'-phosphorothioate
  modified_base 3: mod_base = OTHER; note = 2'-O-methylguanosine-3'-phosphate
  modified_base 4: mod_base = OTHER; note = 2'-O-methyluridine-3'-phosphate
  modified_base 5: mod_base = OTHER; note = 2'-O-methyladenosine-3'-phosphate
  modified_base 6: mod_base = OTHER; note = 2'-O-methyladenosine-3'-phosphate
  modified_base 7: mod_base = OTHER; note = 2'-O-methyladenosine-3'-phosphate
  modified_base 8: mod_base = OTHER; note = 2'-O-methyluridine-3'-phosphate
  modified_base 9: mod_base = OTHER; note = 2'-deoxy-2'-fluorocytidine-3'-phosphate
  modified_base 10: mod_base = OTHER; note = 2'-deoxy-2'-fluoroadenosine-3'-phosphate
  modified_base 11: mod_base = OTHER; note = 2'-deoxy-2'-fluoroguanosine-3'-phosphate
  modified_base 12: mod_base = OTHER; note = 2'-O-methyluridine-3'-phosphate
  modified_base 13: mod_base = OTHER; note = 2'-O-methyladenosine-3'-phosphate
  modified_base 14: mod_base = OTHER; note = 2'-O-methyladenosine-3'-phosphate
  modified_base 15: mod_base = OTHER; note = 2'-O-methylguanosine-3'-phosphate
  modified_base 16: mod_base = OTHER; note = 2'-O-methyladenosine-3'-phosphate
  modified_base 17: mod_base = OTHER; note = 2'-O-methylguanosine-3'-phosphate
  modified_base 18: mod_base = OTHER; note = 2'-O-methylguanosine-3'-phosphate
  modified_base 19: mod_base = OTHER; note = 2'-O-methyluridine-3'-phosphorothioate
  modified_base 20: mod_base = OTHER; note = 2'-O-methylguanosine-3'-phosphorothioate
  modified_base 21: mod_base = OTHER; note = 2'-O-methyladenosine
gggtaaatcagtaagaggtga

SEQ ID NO: 941 - RNA, 21 nt, synthetic construct
  source 1..21: mol_type = other RNA
  modified_base 1: mod_base = OTHER; note = 2'-O-methylguanosine-3'-phosphorothioate
  modified_base 2: mod_base = OTHER; note = 2'-O-methyluridine-3'-phosphorothioate
  modified_base 3: mod_base = OTHER; note = 2'-O-methyladenosine-3'-phosphate
  modified_base 4: mod_base = OTHER; note = 2'-O-methyladenosine-3'-phosphate
  modified_base 5: mod_base = OTHER; note = 2'-O-methyladenosine-3'-phosphate
  modified_base 6: mod_base = OTHER; note = 2'-O-methyluridine-3'-phosphate
  modified_base 7: mod_base = OTHER; note = 2'-O-methylcytidine-3'-phosphate
  modified_base 8: mod_base = OTHER; note = 2'-O-methyladenosine-3'-phosphate
  modified_base 9: mod_base = OTHER; note = 2'-deoxy-2'-fluoroguanosine-3'-phosphate
  modified_base 10: mod_base = OTHER; note = 2'-deoxy-2'-fluorouridine-3'-phosphate
  modified_base 11: mod_base = OTHER; note = 2'-deoxy-2'-fluoroadenosine-3'-phosphate
  modified_base 12: mod_base = OTHER; note = 2'-O-methyladenosine-3'-phosphate
  modified_base 13: mod_base = OTHER; note = 2'-O-methylguanosine-3'-phosphate
  modified_base 14: mod_base = OTHER; note = 2'-O-methyladenosine-3'-phosphate
  modified_base 15: mod_base = OTHER; note = 2'-O-methylguanosine-3'-phosphate
  modified_base 16: mod_base = OTHER; note = 2'-O-methylguanosine-3'-phosphate
  modified_base 17: mod_base = OTHER; note = 2'-O-methyluridine-3'-phosphate
  modified_base 18: mod_base = OTHER; note = 2'-O-methylguanosine-3'-phosphate
  modified_base 19: mod_base = OTHER; note = 2'-O-methyluridine-3'-phosphorothioate
  modified_base 20: mod_base = OTHER; note = 2'-O-methyluridine-3'-phosphorothioate
  modified_base 21: mod_base = OTHER; note = 2'-O-methyladenosine
gtaaatcagtaagaggtgtta

SEQ ID NO: 942 - RNA, 21 nt, synthetic construct
  source 1..21: mol_type = other RNA
  modified_base 1: mod_base = OTHER; note = 2'-O-methyladenosine-3'-phosphorothioate
  modified_base 2: mod_base = OTHER; note = 2'-O-methyladenosine-3'-phosphorothioate
  modified_base 3: mod_base = OTHER; note = 2'-O-methyladenosine-3'-phosphate
  modified_base 4: mod_base = OTHER; note = 2'-O-methyluridine-3'-phosphate
  modified_base 5: mod_base = OTHER; note = 2'-O-methylcytidine-3'-phosphate
  modified_base 6: mod_base = OTHER; note = 2'-O-methyladenosine-3'-phosphate
  modified_base 7: mod_base = OTHER; note = 2'-deoxy-2'-fluoroguanosine-3'-phosphate
  modified_base 8: mod_base = OTHER; note = 2'-O-methyluridine-3'-phosphate
  modified_base 9: mod_base = OTHER; note = 2'-deoxy-2'-fluoroadenosine-3'-phosphate
  modified_base 10: mod_base = OTHER; note = 2'-deoxy-2'-fluoroadenosine-3'-phosphate
  modified_base 11: mod_base = OTHER; note = 2'-deoxy-2'-fluoroguanosine-3'-phosphate
  modified_base 12: mod_base = OTHER; note = 2'-O-methyladenosine-3'-phosphate
  modified_base 13: mod_base = OTHER; note = 2'-O-methylguanosine-3'-phosphate
  modified_base 14: mod_base = OTHER; note = 2'-O-methylguanosine-3'-phosphate
  modified_base 15: mod_base = OTHER; note = 2'-O-methyluridine-3'-phosphate
  modified_base 16: mod_base = OTHER; note = 2'-O-methylguanosine-3'-phosphate
  modified_base 17: mod_base = OTHER; note = 2'-O-methyluridine-3'-phosphate
  modified_base 18: mod_base = OTHER; note = 2'-O-methyluridine-3'-phosphate
  modified_base 19: mod_base = OTHER; note = 2'-O-methyladenosine-3'-phosphorothioate
  modified_base 20: mod_base = OTHER; note = 2'-O-methyluridine-3'-phosphorothioate
  modified_base 21: mod_base = OTHER; note = 2'-O-methyladenosine
aaatcagtaagaggtgttata

SEQ ID NO: 943 - RNA, 21 nt, synthetic construct
  source 1..21: mol_type = other RNA
  modified_base 1: mod_base = OTHER; note = 2'-O-methyladenosine-3'-phosphorothioate
  modified_base 2: mod_base = OTHER; note = 2'-O-methyladenosine-3'-phosphorothioate
  modified_base 3: mod_base = OTHER; note = 2'-O-methyluridine-3'-phosphate
  modified_base 4: mod_base = OTHER; note = 2'-O-methylcytidine-3'-phosphate
  modified_base 5: mod_base = OTHER; note = 2'-O-methyladenosine-3'-phosphate
  modified_base 6: mod_base = OTHER; note = 2'-O-methylguanosine-3'-phosphate
  modified_base 7: mod_base = OTHER; note = 2'-O-methyluridine-3'-phosphate
  modified_base 8: mod_base = OTHER; note = 2'-O-methyladenosine-3'-phosphate
  modified_base 9: mod_base = OTHER; note = 2'-deoxy-2'-fluoroadenosine-3'-phosphate
  modified_base 10: mod_base = OTHER; note = 2'-deoxy-2'-fluoroguanosine-3'-phosphate
  modified_base 11: mod_base = OTHER; note = 2'-deoxy-2'-fluoroadenosine-3'-phosphate
  modified_base 12: mod_base = OTHER; note = 2'-O-methylguanosine-3'-phosphate
  modified_base 13: mod_base = OTHER; note = 2'-O-methylguanosine-3'-phosphate
  modified_base 14: mod_base = OTHER; note = 2'-O-methyluridine-3'-phosphate
  modified_base 15: mod_base = OTHER; note = 2'-O-methylguanosine-3'-phosphate
  modified_base 16: mod_base = OTHER; note = 2'-O-methyluridine-3'-phosphate
  modified_base 17: mod_base = OTHER; note = 2'-O-methyluridine-3'-phosphate
  modified_base 18: mod_base = OTHER; note = 2'-O-methyladenosine-3'-phosphate
  modified_base 19: mod_base = OTHER; note = 2'-O-methyluridine-3'-phosphorothioate
  modified_base 20: mod_base = OTHER; note = 2'-O-methyluridine-3'-phosphorothioate
  modified_base 21: mod_base = OTHER; note = 2'-O-methyladenosine
aatcagtaagaggtgttatta

SEQ ID NO: 944 - RNA, 21 nt, synthetic construct
  source 1..21: mol_type = other RNA
  modified_base 1: mod_base = OTHER; note = 2'-O-methylcytidine-3'-phosphorothioate
  modified_base 2: mod_base = OTHER; note = 2'-O-methyladenosine-3'-phosphorothioate
  modified_base 3: mod_base = OTHER; note = 2'-O-methylguanosine-3'-phosphate
  modified_base 4: mod_base = OTHER; note = 2'-O-methyluridine-3'-phosphate
  modified_base 5: mod_base = OTHER; note = 2'-O-methyladenosine-3'-phosphate
  modified_base 6: mod_base = OTHER; note = 2'-O-methyladenosine-3'-phosphate
  modified_base 7: mod_base = OTHER; note = 2'-O-methylguanosine-3'-phosphate
  modified_base 8: mod_base = OTHER; note = 2'-O-methyladenosine-3'-phosphate
  modified_base 9: mod_base = OTHER; note = 2'-deoxy-2'-fluoroguanosine-3'-phosphate
  modified_base 10: mod_base = OTHER; note = 2'-deoxy-2'-fluoroguanosine-3'-phosphate
  modified_base 11: mod_base = OTHER; note = 2'-deoxy-2'-fluorouridine-3'-phosphate
  modified_base 12: mod_base = OTHER; note = 2'-O-methylguanosine-3'-phosphate
  modified_base 13: mod_base = OTHER; note = 2'-O-methyluridine-3'-phosphate
  modified_base 14: mod_base = OTHER; note = 2'-O-methyluridine-3'-phosphate
  modified_base 15: mod_base = OTHER; note = 2'-O-methyladenosine-3'-phosphate
  modified_base 16: mod_base = OTHER; note = 2'-O-methyluridine-3'-phosphate
  modified_base 17: mod_base = OTHER; note = 2'-O-methyluridine-3'-phosphate
  modified_base 18: mod_base = OTHER; note = 2'-O-methyluridine-3'-phosphate
  modified_base 19: mod_base = OTHER; note = 2'-O-methylguanosine-3'-phosphorothioate
  modified_base 20: mod_base = OTHER; note = 2'-O-methylguanosine-3'-phosphorothioate
  modified_base 21: mod_base = OTHER; note = 2'-O-methyladenosine
cagtaagaggtgttatttgga

SEQ ID NO: 945 - RNA, 21 nt, synthetic construct
  source 1..21: mol_type = other RNA
  modified_base 1: mod_base = OTHER; note = 2'-O-methyluridine-3'-phosphorothioate
  modified_base 2: mod_base = OTHER; note = 2'-O-methyluridine-3'-phosphorothioate
  modified_base 3: mod_base = OTHER; note = 2'-O-methylguanosine-3'-phosphate
  modified_base 4: mod_base = OTHER; note = 2'-O-methylguanosine-3'-phosphate
  modified_base 5: mod_base = OTHER; note = 2'-O-methyladenosine-3'-phosphate
  modified_base 6: mod_base = OTHER; note = 2'-O-methylcytidine-3'-phosphate
  modified_base 7: mod_base = OTHER; note = 2'-deoxy-2'-fluoroadenosine-3'-phosphate
  modified_base 8: mod_base = OTHER; note = 2'-O-methyluridine-3'-phosphate
  modified_base 9: mod_base = OTHER; note = 2'-deoxy-2'-fluoroguanosine-3'-phosphate
  modified_base 10: mod_base = OTHER; note = 2'-deoxy-2'-fluoroguanosine-3'-phosphate
  modified_base 11: mod_base = OTHER; note = 2'-deoxy-2'-fluorocytidine-3'-phosphate
  modified_base 12: mod_base = OTHER; note = 2'-O-methylcytidine-3'-phosphate
  modified_base 13: mod_base = OTHER; note = 2'-O-methyladenosine-3'-phosphate
  modified_base 14: mod_base = OTHER; note = 2'-O-methyluridine-3'-phosphate
  modified_base 15: mod_base = OTHER; note = 2'-O-methylguanosine-3'-phosphate
  modified_base 16: mod_base = OTHER; note = 2'-O-methylguanosine-3'-phosphate
  modified_base 17: mod_base = OTHER; note = 2'-O-methyladenosine-3'-phosphate
  modified_base 18: mod_base = OTHER; note = 2'-O-methyladenosine-3'-phosphate
  modified_base 19: mod_base = OTHER; note = 2'-O-methylcytidine-3'-phosphorothioate
  modified_base 20: mod_base = OTHER; note = 2'-O-methylcytidine-3'-phosphorothioate
  modified_base 21: mod_base = OTHER; note = 2'-O-methyladenosine
ttggacatggccatggaacca

SEQ ID NO: 946 - RNA, 21 nt, synthetic construct
  source 1..21: mol_type = other RNA
  modified_base 1: mod_base = OTHER; note = 2'-O-methyluridine-3'-phosphorothioate
  modified_base 2: mod_base = OTHER; note = 2'-O-methylguanosine-3'-phosphorothioate
  modified_base 3: mod_base = OTHER; note = 2'-O-methylguanosine-3'-phosphate
  modified_base 4: mod_base = OTHER; note = 2'-O-methyladenosine-3'-phosphate
  modified_base 5: mod_base = OTHER; note = 2'-O-methylcytidine-3'-phosphate
  modified_base 6: mod_base = OTHER; note = 2'-O-methyluridine-3'-phosphate
  modified_base 7: mod_base = OTHER; note = 2'-deoxy-2'-fluorocytidine-3'-phosphate
  modified_base 8: mod_base = OTHER; note = 2'-O-methyluridine-3'-phosphate
  modified_base 9: mod_base = OTHER; note = 2'-deoxy-2'-fluoroguanosine-3'-phosphate
  modified_base 10: mod_base = OTHER; note = 2'-deoxy-2'-fluoroguanosine-3'-phosphate
  modified_base 11: mod_base = OTHER; note = 2'-deoxy-2'-fluoroadenosine-3'-phosphate
  modified_base 12: mod_base = OTHER; note = 2'-O-methyladenosine-3'-phosphate
  modified_base 13: mod_base = OTHER; note = 2'-O-methyluridine-3'-phosphate
  modified_base 14: mod_base = OTHER; note = 2'-O-methylcytidine-3'-phosphate
  modified_base 15: mod_base = OTHER; note = 2'-O-methylcytidine-3'-phosphate
  modified_base 16: mod_base = OTHER; note = 2'-O-methyladenosine-3'-phosphate
  modified_base 17: mod_base = OTHER; note = 2'-O-methyluridine-3'-phosphate
  modified_base 18: mod_base = OTHER; note = 2'-O-methyluridine-3'-phosphate
  modified_base 19: mod_base = OTHER; note = 2'-O-methylcytidine-3'-phosphorothioate
  modified_base 20: mod_base = OTHER; note = 2'-O-methyluridine-3'-phosphorothioate
  modified_base 21: mod_base = OTHER; note = 2'-O-methyladenosine
tggactctggaatccattcta

SEQ ID NO: 947 - RNA, 21 nt, synthetic construct
  source 1..21: mol_type = other RNA
  modified_base 1: mod_base = OTHER; note = 2'-O-methylcytidine-3'-phosphorothioate
  modified_base 2: mod_base = OTHER; note = 2'-O-methyluridine-3'-phosphorothioate
  modified_base 3: mod_base = OTHER; note = 2'-O-methylcytidine-3'-phosphate
  modified_base 4: mod_base = OTHER; note = 2'-O-methyluridine-3'-phosphate
  modified_base 5: mod_base = OTHER; note = 2'-O-methylguanosine-3'-phosphate
  modified_base 6: mod_base = OTHER; note = 2'-O-methyladenosine-3'-phosphate
  modified_base 7: mod_base = OTHER; note = 2'-deoxy-2'-fluoroguanosine-3'-phosphate
  modified_base 8: mod_base = OTHER; note = 2'-O-methyluridine-3'-phosphate
  modified_base 9: mod_base = OTHER; note = 2'-deoxy-2'-fluoroguanosine-3'-phosphate
  modified_base 10: mod_base = OTHER; note = 2'-deoxy-2'-fluoroguanosine-3'-phosphate
  modified_base 11: mod_base = OTHER; note = 2'-deoxy-2'-fluorouridine-3'-phosphate
  modified_base 12: mod_base = OTHER; note = 2'-O-methyladenosine-3'-phosphate
  modified_base 13: mod_base = OTHER; note = 2'-O-methyladenosine-3'-phosphate
  modified_base 14: mod_base = OTHER; note = 2'-O-methyladenosine-3'-phosphate
  modified_base 15: mod_base = OTHER; note = 2'-O-methylguanosine-3'-phosphate
  modified_base 16: mod_base = OTHER; note = 2'-O-methylguanosine-3'-phosphate
  modified_base 17: mod_base = OTHER; note = 2'-O-methylcytidine-3'-phosphate
  modified_base 18: mod_base = OTHER; note = 2'-O-methyladenosine-3'-phosphate
  modified_base 19: mod_base = OTHER; note = 2'-O-methyladenosine-3'-phosphorothioate
  modified_base 20: mod_base = OTHER; note = 2'-O-methyluridine-3'-phosphorothioate
  modified_base 21: mod_base = OTHER; note = 2'-O-methyladenosine
ctctgagtggtaaaggcaata

SEQ ID NO: 948 - RNA, 21 nt, synthetic construct
  source 1..21: mol_type = other RNA
  modified_base 1: mod_base = OTHER; note = 2'-O-methyluridine-3'-phosphorothioate
  modified_base 2: mod_base = OTHER; note = 2'-O-methylcytidine-3'-phosphorothioate
  modified_base 3: mod_base = OTHER; note = 2'-O-methyladenosine-3'-phosphate
  modified_base 4: mod_base = OTHER; note = 2'-O-methyladenosine-3'-phosphate
  modified_base 5: mod_base = OTHER; note = 2'-O-methylguanosine-3'-phosphate
  modified_base 6: mod_base = OTHER; note = 2'-O-methyladenosine-3'-phosphate
  modified_base 7: mod_base = OTHER; note = 2'-deoxy-2'-fluoroadenosine-3'-phosphate
  modified_base 8: mod_base = OTHER; note = 2'-O-methylcytidine-3'-phosphate
  modified_base 9: mod_base = OTHER; note = 2'-deoxy-2'-fluoroadenosine-3'-phosphate
  modified_base 10: mod_base = OTHER; note = 2'-deoxy-2'-fluoroadenosine-3'-phosphate
  modified_base 11: mod_base = OTHER; note = 2'-deoxy-2'-fluoroguanosine-3'-phosphate
  modified_base 12: mod_base = OTHER; note = 2'-O-methyluridine-3'-phosphate
  modified_base 13: mod_base = OTHER; note = 2'-O-methyladenosine-3'-phosphate
  modified_base 14: mod_base = OTHER; note = 2'-O-methylguanosine-3'-phosphate
  modified_base 15: mod_base = OTHER; note = 2'-O-methylcytidine-3'-phosphate
  modified_base 16: mod_base = OTHER; note = 2'-O-methyluridine-3'-phosphate
  modified_base 17: mod_base = OTHER; note = 2'-O-methylguanosine-3'-phosphate
  modified_base 18: mod_base = OTHER; note = 2'-O-methyladenosine-3'-phosphate
  modified_base 19: mod_base = OTHER; note = 2'-O-methyluridine-3'-phosphorothioate
  modified_base 20: mod_base = OTHER; note = 2'-O-methyladenosine-3'-phosphorothioate
  modified_base 21: mod_base = OTHER; note = 2'-O-methyladenosine
tcaagaacaagtagctgataa

SEQ ID NO: 949 - RNA, 21 nt, synthetic construct
  source 1..21: mol_type = other RNA
  modified_base 1: mod_base = OTHER; note = 2'-O-methyluridine-3'-phosphorothioate
  modified_base 2: mod_base = OTHER; note = 2'-O-methyladenosine-3'-phosphorothioate
  modified_base 3: mod_base = OTHER; note = 2'-O-methylguanosine-3'-phosphate
  modified_base 4: mod_base = OTHER; note = 2'-O-methylcytidine-3'-phosphate
  modified_base 5: mod_base = OTHER; note = 2'-O-methyluridine-3'-phosphate
  modified_base 6: mod_base = OTHER; note = 2'-O-methylguanosine-3'-phosphate
  modified_base 7: mod_base = OTHER; note = 2'-deoxy-2'-fluoroadenosine-3'-phosphate
  modified_base 8: mod_base = OTHER; note = 2'-O-methyluridine-3'-phosphate
  modified_base 9: mod_base = OTHER; note = 2'-deoxy-2'-fluoroadenosine-3'-phosphate
  modified_base 10: mod_base = OTHER; note = 2'-deoxy-2'-fluorouridine-3'-phosphate
  modified_base 11: mod_base = OTHER; note = 2'-deoxy-2'-fluorouridine-3'-phosphate
  modified_base 12: mod_base = OTHER; note = 2'-O-methylguanosine-3'-phosphate
  modified_base 13: mod_base = OTHER; note = 2'-O-methyladenosine-3'-phosphate
  modified_base 14: mod_base = OTHER; note = 2'-O-methyluridine-3'-phosphate
  modified_base 15: mod_base = OTHER; note = 2'-O-methylguanosine-3'-phosphate
  modified_base 16: mod_base = OTHER; note = 2'-O-methylguanosine-3'-phosphate
  modified_base 17: mod_base = OTHER; note = 2'-O-methyladenosine-3'-phosphate
  modified_base 18: mod_base = OTHER; note = 2'-O-methylcytidine-3'-phosphate
  modified_base 19: mod_base = OTHER; note = 2'-O-methyladenosine-3'-phosphorothioate
  modified_base 20: mod_base = OTHER; note = 2'-O-methylguanosine-3'-phosphorothioate
  modified_base 21: mod_base = OTHER; note = 2'-O-methyladenosine
tagctgatattgatggacaga

SEQ ID NO: 950 - RNA, 21 nt, synthetic construct
  source 1..21: mol_type = other RNA
  modified_base 1: mod_base = OTHER; note = 2'-O-methyladenosine-3'-phosphorothioate
  modified_base 2: mod_base = OTHER; note = 2'-O-methylguanosine-3'-phosphorothioate
  modified_base 3: mod_base = OTHER; note = 2'-O-methylcytidine-3'-phosphate
  modified_base 4: mod_base = OTHER; note = 2'-O-methyluridine-3'-phosphate
  modified_base 5: mod_base = OTHER; note = 2'-O-methylguanosine-3'-phosphate
  modified_base 6: mod_base = OTHER; note = 2'-O-methyladenosine-3'-phosphate
  modified_base 7: mod_base = OTHER; note = 2'-deoxy-2'-fluorouridine-3'-phosphate
  modified_base 8: mod_base = OTHER; note = 2'-O-methyladenosine-3'-phosphate
  modified_base 9: mod_base = OTHER; note = 2'-deoxy-2'-fluorouridine-3'-phosphate
  modified_base 10: mod_base = OTHER; note = 2'-deoxy-2'-fluorouridine-3'-phosphate
  modified_base 11: mod_base = OTHER; note = 2'-deoxy-2'-fluoroguanosine-3'-phosphate
  modified_base 12: mod_base = OTHER; note = 2'-O-methyladenosine-3'-phosphate
  modified_base 13: mod_base = OTHER; note = 2'-O-methyluridine-3'-phosphate
  modified_base 14: mod_base = OTHER; note = 2'-O-methylguanosine-3'-phosphate
  modified_base 15: mod_base = OTHER; note = 2'-O-methylguanosine-3'-phosphate
  modified_base 16: mod_base = OTHER; note = 2'-O-methyladenosine-3'-phosphate
  modified_base 17: mod_base = OTHER; note = 2'-O-methylcytidine-3'-phosphate
  modified_base 18: mod_base = OTHER; note = 2'-O-methyladenosine-3'-phosphate
  modified_base 19: mod_base = OTHER; note = 2'-O-methylguanosine-3'-phosphorothioate
  modified_base 20: mod_base = OTHER; note = 2'-O-methyluridine-3'-phosphorothioate
  modified_base 21: mod_base = OTHER; note = 2'-O-methyladenosine
agctgatattgatggacagta

SEQ ID NO: 951 - RNA, 21 nt, synthetic construct
  source 1..21: mol_type = other RNA
  modified_base 1: mod_base = OTHER; note = 2'-O-methylcytidine-3'-phosphorothioate
  modified_base 2: mod_base = OTHER; note = 2'-O-methyluridine-3'-phosphorothioate
  modified_base 3: mod_base = OTHER; note = 2'-O-methylguanosine-3'-phosphate
  modified_base 4: mod_base = OTHER; note = 2'-O-methyladenosine-3'-phosphate
  modified_base 5: mod_base = OTHER; note = 2'-O-methyluridine-3'-phosphate
  modified_base 6: mod_base = OTHER; note = 2'-O-methyladenosine-3'-phosphate
  modified_base 7: mod_base = OTHER; note = 2'-deoxy-2'-fluorouridine-3'-phosphate
  modified_base 8: mod_base = OTHER; note = 2'-O-methyluridine-3'-phosphate
  modified_base 9: mod_base = OTHER; note = 2'-deoxy-2'-fluoroguanosine-3'-phosphate
  modified_base 10: mod_base = OTHER; note = 2'-deoxy-2'-fluoroadenosine-3'-phosphate
  modified_base 11: mod_base = OTHER; note = 2'-deoxy-2'-fluorouridine-3'-phosphate
  modified_base 12: mod_base = OTHER; note = 2'-O-methylguanosine-3'-phosphate
  modified_base 13: mod_base = OTHER; note = 2'-O-methylguanosine-3'-phosphate
  modified_base 14: mod_base = OTHER; note = 2'-O-methyladenosine-3'-phosphate
  modified_base 15: mod_base = OTHER; note = 2'-O-methylcytidine-3'-phosphate
  modified_base 16: mod_base = OTHER; note = 2'-O-methyladenosine-3'-phosphate
  modified_base 17: mod_base = OTHER; note = 2'-O-methylguanosine-3'-phosphate
  modified_base 18: mod_base = OTHER; note = 2'-O-methyluridine-3'-phosphate
  modified_base 19: mod_base = OTHER; note = 2'-O-methyladenosine-3'-phosphorothioate
  modified_base 20: mod_base = OTHER; note = 2'-O-methyluridine-3'-phosphorothioate
  modified_base 21: mod_base = OTHER; note = 2'-O-methyladenosine
ctgatattgatggacagtata

SEQ ID NO: 952 - RNA, 21 nt, synthetic construct
  source 1..21: mol_type = other RNA
  modified_base 1: mod_base = OTHER; note = 2'-O-methyluridine-3'-phosphorothioate
  modified_base 2: mod_base = OTHER; note = 2'-O-methylguanosine-3'-phosphorothioate
  modified_base 3: mod_base = OTHER; note = 2'-O-methyladenosine-3'-phosphate
  modified_base 4: mod_base = OTHER; note = 2'-O-methyluridine-3'-phosphate
  modified_base 5: mod_base = OTHER; note = 2'-O-methylguanosine-3'-phosphate
  modified_base 6: mod_base = OTHER; note = 2'-O-methylguanosine-3'-phosphate
  modified_base 7: mod_base = OTHER; note = 2'-deoxy-2'-fluoroadenosine-3'-phosphate
  modified_base 8: mod_base = OTHER; note = 2'-O-methylcytidine-3'-phosphate
  modified_base 9: mod_base = OTHER; note = 2'-deoxy-2'-fluoroadenosine-3'-phosphate
  modified_base 10: mod_base = OTHER; note = 2'-deoxy-2'-fluoroguanosine-3'-phosphate
  modified_base 11: mod_base = OTHER; note = 2'-deoxy-2'-fluorouridine-3'-phosphate
  modified_base 12: mod_base = OTHER; note = 2'-O-methyladenosine-3'-phosphate
  modified_base 13: mod_base = OTHER; note = 2'-O-methyluridine-3'-phosphate
  modified_base 14: mod_base = OTHER; note = 2'-O-methylguanosine-3'-phosphate
  modified_base 15: mod_base = OTHER; note = 2'-O-methylcytidine-3'-phosphate
  modified_base 16: mod_base = OTHER; note = 2'-O-methyladenosine-3'-phosphate
  modified_base 17: mod_base = OTHER; note = 2'-O-methyladenosine-3'-phosphate
  modified_base 18: mod_base = OTHER; note = 2'-O-methyluridine-3'-phosphate
  modified_base 19: mod_base = OTHER; note = 2'-O-methylguanosine-3'-phosphorothioate
  modified_base 20: mod_base = OTHER; note = 2'-O-methyladenosine-3'-phosphorothioate
  modified_base 21: mod_base = OTHER; note = 2'-O-methyladenosine
tgatggacagtatgcaatgaa

SEQ ID NO: 953 - RNA, 21 nt, synthetic construct
  source 1..21: mol_type = other RNA
  modified_base 1: mod_base = OTHER; note = 2'-O-methyladenosine-3'-phosphorothioate
  modified_base 2: mod_base = OTHER; note = 2'-O-methylguanosine-3'-phosphorothioate
  modified_base 3: mod_base = OTHER; note = 2'-O-methyluridine-3'-phosphate
  modified_base 4: mod_base = OTHER; note = 2'-O-methyladenosine-3'-phosphate
  modified_base 5: mod_base = OTHER; note = 2'-O-methyluridine-3'-phosphate
  modified_base 6: mod_base = OTHER; note = 2'-O-methylguanosine-3'-phosphate
  modified_base 7: mod_base = OTHER; note = 2'-deoxy-2'-fluorocytidine-3'-phosphate
  modified_base 8: mod_base = OTHER; note = 2'-O-methyladenosine-3'-phosphate
  modified_base 9: mod_base = OTHER; note = 2'-deoxy-2'-fluoroadenosine-3'-phosphate
  modified_base 10: mod_base = OTHER; note = 2'-deoxy-2'-fluorouridine-3'-phosphate
  modified_base 11: mod_base = OTHER; note = 2'-deoxy-2'-fluoroguanosine-3'-phosphate
  modified_base 12: mod_base = OTHER; note = 2'-O-methyladenosine-3'-phosphate
  modified_base 13: mod_base = OTHER; note = 2'-O-methylcytidine-3'-phosphate
  modified_base 14: mod_base = OTHER; note = 2'-O-methyluridine-3'-phosphate
  modified_base 15: mod_base = OTHER; note = 2'-O-methylcytidine-3'-phosphate
  modified_base 16: mod_base = OTHER; note = 2'-O-methylguanosine-3'-phosphate
  modified_base 17: mod_base = OTHER; note = 2'-O-methyladenosine-3'-phosphate
  modified_base 18: mod_base = OTHER; note = 2'-O-methylguanosine-3'-phosphate
  modified_base 19: mod_base = OTHER; note = 2'-O-methylcytidine-3'-phosphorothioate
  modified_base 20: mod_base = OTHER; note = 2'-O-methyluridine-3'-phosphorothioate
  modified_base 21: mod_base = OTHER; note = 2'-O-methyladenosine
agtatgcaatgactcgagcta

SEQ ID NO: 954 - RNA, 21 nt, synthetic construct
  source 1..21: mol_type = other RNA
  modified_base 1: mod_base = OTHER; note = 2'-O-methyladenosine-3'-phosphorothioate
  modified_base 2: mod_base = OTHER; note = 2'-O-methylguanosine-3'-phosphorothioate
  modified_base 3: mod_base = OTHER; note = 2'-O-methylcytidine-3'-phosphate
  modified_base 4: mod_base = OTHER; note = 2'-O-methyluridine-3'-phosphate
  modified_base 5: mod_base = OTHER; note = 2'-O-methylcytidine-3'-phosphate
  modified_base 6: mod_base = OTHER; note = 2'-O-methyladenosine-3'-phosphate
  modified_base 7: mod_base = OTHER; note = 2'-deoxy-2'-fluoroguanosine-3'-phosphate
  modified_base 8: mod_base = OTHER; note = 2'-O-methyladenosine-3'-phosphate
  modified_base 9: mod_base = OTHER; note = 2'-deoxy-2'-fluoroguanosine-3'-phosphate
  modified_base 10: mod_base = OTHER; note = 2'-deoxy-2'-fluoroguanosine-3'-phosphate
  modified_base 11: mod_base = OTHER; note = 2'-deoxy-2'-fluoroguanosine-3'-phosphate
  modified_base 12: mod_base = OTHER; note = 2'-O-methyluridine-3'-phosphate
  modified_base 13: mod_base = OTHER; note = 2'-O-methyladenosine-3'-phosphate
  modified_base 14: mod_base = OTHER; note = 2'-O-methylcytidine-3'-phosphate
  modified_base 15: mod_base = OTHER; note = 2'-O-methylguanosine-3'-phosphate
  modified_base 16: mod_base = OTHER; note = 2'-O-methyladenosine-3'-phosphate
  modified_base 17: mod_base = OTHER; note = 2'-O-methylguanosine-3'-phosphate
  modified_base 18: mod_base = OTHER; note = 2'-O-methylcytidine-3'-phosphate
  modified_base 19: mod_base = OTHER; note = 2'-O-methyluridine-3'-phosphorothioate
  modified_base 20: mod_base = OTHER; note = 2'-O-methylguanosine-3'-phosphorothioate
  modified_base 21: mod_base = OTHER; note = 2'-O-methyladenosine
agctcagagggtacgagctga

SEQ ID NO: 955 - RNA, 21 nt, synthetic construct
  source 1..21: mol_type = other RNA
  modified_base 1: mod_base = OTHER; note = 2'-O-methylcytidine-3'-phosphorothioate
  modified_base 2: mod_base = OTHER; note = 2'-O-methyluridine-3'-phosphorothioate
  modified_base 3: mod_base = OTHER; note = 2'-O-methylcytidine-3'-phosphate
  modified_base 4: mod_base = OTHER; note = 2'-O-methyladenosine-3'-phosphate
  modified_base 5: mod_base = OTHER; note = 2'-O-methylguanosine-3'-phosphate
  modified_base 6: mod_base = OTHER; note = 2'-O-methyladenosine-3'-phosphate
  modified_base 7: mod_base = OTHER; note = 2'-deoxy-2'-fluoroguanosine-3'-phosphate
  modified_base 8: mod_base = OTHER; note = 2'-O-methylguanosine-3'-phosphate
  modified_base 9: mod_base = OTHER; note = 2'-deoxy-2'-fluoroguanosine-3'-phosphate
  modified_base 10: mod_base = OTHER; note = 2'-deoxy-2'-fluorouridine-3'-phosphate
  modified_base 11: mod_base = OTHER; note = 2'-deoxy-2'-fluoroadenosine-3'-phosphate
  modified_base 12: mod_base = OTHER; note = 2'-O-methylcytidine-3'-phosphate
  modified_base 13: mod_base = OTHER; note = 2'-O-methylguanosine-3'-phosphate
  modified_base 14: mod_base = OTHER; note = 2'-O-methyladenosine-3'-phosphate
  modified_base 15: mod_base = OTHER; note = 2'-O-methylguanosine-3'-phosphate
  modified_base 16: mod_base = OTHER; note = 2'-O-methylcytidine-3'-phosphate
  modified_base 17: mod_base = OTHER; note = 2'-O-methyluridine-3'-phosphate
  modified_base 18: mod_base = OTHER; note = 2'-O-methylguanosine-3'-phosphate
  modified_base 19: mod_base = OTHER; note = 2'-O-methylcytidine-3'-phosphorothioate
  modified_base 20: mod_base = OTHER; note = 2'-O-methyluridine-3'-phosphorothioate
  modified_base 21: mod_base = OTHER; note = 2'-O-methyladenosine
ctcagagggtacgagctgcta

SEQ ID NO: 956 - RNA, 21 nt, synthetic construct
  source 1..21: mol_type = other RNA
  modified_base 1: mod_base = OTHER; note = 2'-O-methyladenosine-3'-phosphorothioate
  modified_base 2: mod_base = OTHER; note = 2'-O-methylguanosine-3'-phosphorothioate
  modified_base 3: mod_base = OTHER; note = 2'-O-methyladenosine-3'-phosphate
  modified_base 4: mod_base = OTHER; note = 2'-O-methylguanosine-3'-phosphate
  modified_base 5: mod_base = OTHER; note = 2'-O-methylguanosine-3'-phosphate
  modified_base 6: mod_base = OTHER; note = 2'-O-methylguanosine-3'-phosphate
  modified_base 7: mod_base = OTHER; note = 2'-deoxy-2'-fluorouridine-3'-phosphate
  modified_base 8: mod_base = OTHER; note = 2'-O-methyladenosine-3'-phosphate
  modified_base 9: mod_base = OTHER; note = 2'-deoxy-2'-fluorocytidine-3'-phosphate
  modified_base 10: mod_base = OTHER; note = 2'-deoxy-2'-fluoroguanosine-3'-phosphate
  modified_base 11: mod_base = OTHER; note = 2'-deoxy-2'-fluoroadenosine-3'-phosphate
  modified_base 12: mod_base = OTHER; note = 2'-O-methylguanosine-3'-phosphate
  modified_base 13: mod_base = OTHER; note = 2'-O-methylcytidine-3'-phosphate
  modified_base 14: mod_base = OTHER; note = 2'-O-methyluridine-3'-phosphate
  modified_base 15: mod_base = OTHER; note = 2'-O-methylguanosine-3'-phosphate
  modified_base 16: mod_base = OTHER; note = 2'-O-methylcytidine-3'-phosphate
  modified_base 17: mod_base = OTHER; note = 2'-O-methyluridine-3'-phosphate
  modified_base 18: mod_base = OTHER; note = 2'-O-methyladenosine-3'-phosphate
  modified_base 19: mod_base = OTHER; note = 2'-O-methyluridine-3'-phosphorothioate
  modified_base 20: mod_base = OTHER; note = 2'-O-methylguanosine-3'-phosphorothioate
  modified_base 21: mod_base = OTHER; note = 2'-O-methyladenosine
agagggtacgagctgctatga

SEQ ID NO: 957 - RNA, 21 nt, synthetic construct
  source 1..21: mol_type = other RNA
  modified_base 1: mod_base = OTHER; note = 2'-O-methylguanosine-3'-phosphorothioate
  modified_base 2: mod_base = OTHER; note = 2'-O-methylcytidine-3'-phosphorothioate
  modified_base 3: mod_base = OTHER; note = 2'-O-methyluridine-3'-phosphate
  modified_base 4: mod_base = OTHER; note = 2'-O-methyladenosine-3'-phosphate
  modified_base 5: mod_base = OTHER; note = 2'-O-methyluridine-3'-phosphate
  modified_base 6: mod_base = OTHER; note = 2'-O-methylguanosine-3'-phosphate
  modified_base 7: mod_base = OTHER; note = 2'-deoxy-2'-fluorouridine-3'-phosphate
  modified_base 8: mod_base = OTHER; note = 2'-O-methyluridine-3'-phosphate
  modified_base 9: mod_base = OTHER; note = 2'-deoxy-2'-fluorocytidine-3'-phosphate
  modified_base 10: mod_base = OTHER; note = 2'-deoxy-2'-fluorocytidine-3'-phosphate
  modified_base 11: mod_base = OTHER; note = 2'-deoxy-2'-fluorocytidine-3'-phosphate
  modified_base 12: mod_base = OTHER; note = 2'-O-methyluridine-3'-phosphate
  modified_base 13: mod_base = OTHER; note = 2'-O-methylguanosine-3'-phosphate
  modified_base 14: mod_base = OTHER; note = 2'-O-methyladenosine-3'-phosphate
  modified_base 15: mod_base = OTHER; note = 2'-O-methylguanosine-3'-phosphate
  modified_base 16: mod_base = OTHER; note = 2'-O-methyladenosine-3'-phosphate
  modified_base 17: mod_base = OTHER; note = 2'-O-methylcytidine-3'-phosphate
  modified_base 18: mod_base = OTHER; note = 2'-O-methyladenosine-3'-phosphate
  modified_base 19: mod_base = OTHER; note = 2'-O-methyluridine-3'-phosphorothioate
  modified_base 20: mod_base = OTHER; note = 2'-O-methyluridine-3'-phosphorothioate
  modified_base 21: mod_base = OTHER; note = 2'-O-methyladenosine
gctatgttccctgagacatta

SEQ ID NO: 958 - RNA, 21 nt, synthetic construct
  source 1..21: mol_type = other RNA
  modified_base 1: mod_base = OTHER; note = 2'-O-methyladenosine-3'-phosphorothioate
  modified_base 2: mod_base = OTHER; note = 2'-O-methylguanosine-3'-phosphorothioate
  modified_base 3: mod_base = OTHER; note = 2'-O-methylcytidine-3'-phosphate
  modified_base 4: mod_base = OTHER; note = 2'-O-methylguanosine-3'-phosphate
  modified_base 5: mod_base = OTHER; note = 2'-O-methyluridine-3'-phosphate
  modified_base 6: mod_base = OTHER; note = 2'-O-methyluridine-3'-phosphate
  modified_base 7: mod_base = OTHER; note = 2'-deoxy-2'-fluorouridine-3'-phosphate
  modified_base 8: mod_base = OTHER; note = 2'-O-methylguanosine-3'-phosphate
  modified_base 9: mod_base = OTHER; note = 2'-deoxy-2'-fluoroguanosine-3'-phosphate
  modified_base 10: mod_base = OTHER; note = 2'-deoxy-2'-fluorocytidine-3'-phosphate
  modified_base 11: mod_base = OTHER; note = 2'-deoxy-2'-fluorouridine-3'-phosphate
  modified_base 12: mod_base = OTHER; note = 2'-O-methylguanosine-3'-phosphate
  modified_base 13: mod_base = OTHER; note = 2'-O-methyladenosine-3'-phosphate
  modified_base 14: mod_base = OTHER; note = 2'-O-methyladenosine-3'-phosphate
  modified_base 15: mod_base = OTHER; note = 2'-O-methylcytidine-3'-phosphate
  modified_base 16: mod_base = OTHER; note = 2'-O-methylcytidine-3'-phosphate
  modified_base 17: mod_base = OTHER; note = 2'-O-methyladenosine-3'-phosphate
  modified_base 18: mod_base = OTHER; note = 2'-O-methyluridine-3'-phosphate
  modified_base 19: mod_base = OTHER; note = 2'-O-methylcytidine-3'-phosphorothioate
  modified_base 20: mod_base = OTHER; note = 2'-O-methyladenosine-3'-phosphorothioate
  modified_base 21: mod_base = OTHER; note = 2'-O-methyladenosine
agcgtttggctgaaccatcaa

SEQ ID NO: 959 - RNA, 21 nt, synthetic construct
  source 1..21: mol_type = other RNA
  modified_base 1: mod_base = OTHER; note = 2'-O-methyluridine-3'-phosphorothioate
  modified_base 2: mod_base = OTHER; note = 2'-O-methylguanosine-3'-phosphorothioate
  modified_base 3: mod_base = OTHER; note = 2'-O-methylcytidine-3'-phosphate
  modified_base 4: mod_base = OTHER; note = 2'-O-methyluridine-3'-phosphate
  modified_base 5: mod_base = OTHER; note = 2'-O-methylguanosine-3'-phosphate
  modified_base 6: mod_base = OTHER; note = 2'-O-methyladenosine-3'-phosphate
  modified_base 7: mod_base = OTHER; note = 2'-deoxy-2'-fluoroadenosine-3'-phosphate
  modified_base 8: mod_base = OTHER; note = 2'-O-methyladenosine-3'-phosphate
  modified_base 9: mod_base = OTHER; note = 2'-deoxy-2'-fluorocytidine-3'-phosphate
  modified_base 10: mod_base = OTHER; note = 2'-deoxy-2'-fluoroadenosine-3'-phosphate
  modified_base 11: mod_base = OTHER; note = 2'-deoxy-2'-fluorouridine-3'-phosphate
  modified_base 12: mod_base = OTHER; note = 2'-O-methylguanosine-3'-phosphate
  modified_base 13: mod_base = OTHER; note = 2'-O-methylcytidine-3'-phosphate
  modified_base 14: mod_base = OTHER; note = 2'-O-methyladenosine-3'-phosphate
  modified_base 15: mod_base = OTHER; note = 2'-O-methylguanosine-3'-phosphate
  modified_base 16: mod_base = OTHER; note = 2'-O-methyluridine-3'-phosphate
  modified_base 17: mod_base = OTHER; note = 2'-O-methyluridine-3'-phosphate
  modified_base 18: mod_base = OTHER; note = 2'-O-methylguanosine-3'-phosphate
  modified_base 19: mod_base = OTHER; note = 2'-O-methyluridine-3'-phosphorothioate
  modified_base 20: mod_base = OTHER; note = 2'-O-methyladenosine-3'-phosphorothioate
  modified_base 21: mod_base = OTHER; note = 2'-O-methyladenosine
tgctgaaacatgcagttgtaa

SEQ ID NO: 960 - RNA, 21 nt, synthetic construct
  source 1..21: mol_type = other RNA
  modified_base 1: mod_base = OTHER; note = 2'-O-methylcytidine-3'-phosphorothioate
  modified_base 2: mod_base = OTHER; note = 2'-O-methyladenosine-3'-phosphorothioate
  modified_base 3: mod_base = OTHER; note = 2'-O-methyluridine-3'-phosphate
  modified_base 4: mod_base = OTHER; note = 2'-O-methylguanosine-3'-phosphate
  modified_base 5: mod_base = OTHER; note = 2'-O-methylcytidine-3'-phosphate
  modified_base 6: mod_base = OTHER; note = 2'-O-methyladenosine-3'-phosphate
  modified_base 7: mod_base = OTHER; note = 2'-deoxy-2'-fluoroguanosine-3'-phosphate
  modified_base 8: mod_base = OTHER; note = 2'-O-methyluridine-3'-phosphate
  modified_base 9: mod_base = OTHER; note = 2'-deoxy-2'-fluorouridine-3'-phosphate
  modified_base 10: mod_base = OTHER; note = 2'-deoxy-2'-fluoroguanosine-3'-phosphate
  modified_base 11: mod_base = OTHER; note = 2'-deoxy-2'-fluorouridine-3'-phosphate
  modified_base 12: mod_base = OTHER; note = 2'-O-methyladenosine-3'-phosphate
  modified_base 13: mod_base = OTHER; note = 2'-O-methyladenosine-3'-phosphate
  modified_base 14: mod_base = OTHER; note = 2'-O-methyladenosine-3'-phosphate
  modified_base 15: mod_base = OTHER; note = 2'-O-methylcytidine-3'-phosphate
  modified_base 16: mod_base = OTHER; note = 2'-O-methyluridine-3'-phosphate
  modified_base 17: mod_base = OTHER; note = 2'-O-methyluridine-3'-phosphate
  modified_base 18: mod_base = OTHER; note = 2'-O-methylguanosine-3'-phosphate
  modified_base 19: mod_base = OTHER; note = 2'-O-methyladenosine-3'-phosphorothioate
  modified_base 20: mod_base = OTHER; note = 2'-O-methyluridine-3'-phosphorothioate
  modified_base 21: mod_base = OTHER; note = 2'-O-methyladenosine
catgcagttgtaaacttgata

SEQ ID NO: 961 - RNA, 21 nt, synthetic construct
  source 1..21: mol_type = other RNA
  modified_base 1: mod_base = OTHER; note = 2'-O-methylguanosine-3'-phosphorothioate
  modified_base 2: mod_base = OTHER; note = 2'-O-methylcytidine-3'-phosphorothioate
  modified_base 3: mod_base = OTHER; note = 2'-O-methyladenosine-3'-phosphate
  modified_base 4: mod_base = OTHER; note = 2'-O-methylguanosine-3'-phosphate
  modified_base 5: mod_base = OTHER; note = 2'-O-methyluridine-3'-phosphate
  modified_base 6: mod_base = OTHER; note = 2'-O-methyluridine-3'-phosphate
  modified_base 7: mod_base = OTHER; note = 2'-deoxy-2'-fluoroguanosine-3'-phosphate
  modified_base 8: mod_base = OTHER; note = 2'-O-methyluridine-3'-phosphate
  modified_base 9: mod_base = OTHER; note = 2'-deoxy-2'-fluoroadenosine-3'-phosphate
  modified_base 10: mod_base = OTHER; note = 2'-deoxy-2'-fluoroadenosine-3'-phosphate
  modified_base 11: mod_base = OTHER; note = 2'-deoxy-2'-fluoroadenosine-3'-phosphate
  modified_base 12: mod_base = OTHER; note = 2'-O-methylcytidine-3'-phosphate
  modified_base 13: mod_base = OTHER; note = 2'-O-methyluridine-3'-phosphate
  modified_base 14: mod_base = OTHER; note = 2'-O-methyluridine-3'-phosphate
  modified_base 15: mod_base = OTHER; note = 2'-O-methylguanosine-3'-phosphate
  modified_base 16: mod_base = OTHER; note = 2'-O-methyladenosine-3'-phosphate
  modified_base 17: mod_base = OTHER; note = 2'-O-methyluridine-3'-phosphate
  modified_base 18: mod_base = OTHER; note = 2'-O-methyluridine-3'-phosphate
  modified_base 19: mod_base = OTHER; note = 2'-O-methyladenosine-3'-phosphorothioate
  modified_base 20: mod_base = OTHER; note = 2'-O-methyladenosine-3'-phosphorothioate
  modified_base 21: mod_base = OTHER; note = 2'-O-methyladenosine
gcagttgtaaacttgattaaa

SEQ ID NO: 962 - RNA, 21 nt, synthetic construct
  source 1..21: mol_type = other RNA
  modified_base 1: mod_base = OTHER; note = 2'-O-methyluridine-3'-phosphorothioate
  modified_base 2: mod_base = OTHER; note = 2'-O-methylguanosine-3'-phosphorothioate
  modified_base 3: mod_base = OTHER; note = 2'-O-methyladenosine-3'-phosphate
  modified_base 4: mod_base = OTHER; note = 2'-O-methyluridine-3'-phosphate
  modified_base 5: mod_base = OTHER; note = 2'-O-methyluridine-3'-phosphate
  modified_base 6: mod_base = OTHER; note = 2'-O-methyladenosine-3'-phosphate
  modified_base 7: mod_base = OTHER; note = 2'-deoxy-2'-fluoroadenosine-3'-phosphate
  modified_base 8: mod_base = OTHER; note = 2'-O-methylcytidine-3'-phosphate
  modified_base 9: mod_base = OTHER; note = 2'-deoxy-2'-fluorouridine-3'-phosphate
  modified_base 10: mod_base = OTHER; note = 2'-deoxy-2'-fluoroadenosine-3'-phosphate
  modified_base 11: mod_base = OTHER; note = 2'-deoxy-2'-fluorouridine-3'-phosphate
  modified_base 12: mod_base = OTHER; note = 2'-O-methylcytidine-3'-phosphate
  modified_base 13: mod_base = OTHER; note = 2'-O-methyladenosine-3'-phosphate
  modified_base 14: mod_base = OTHER; note = 2'-O-methyladenosine-3'-phosphate
  modified_base 15: mod_base = OTHER; note = 2'-O-methylguanosine-3'-phosphate
  modified_base 16: mod_base = OTHER; note = 2'-O-methyladenosine-3'-phosphate
  modified_base 17: mod_base = OTHER; note = 2'-O-methyluridine-3'-phosphate
  modified_base 18: mod_base = OTHER; note = 2'-O-methylguanosine-3'-phosphate
  modified_base 19: mod_base = OTHER; note = 2'-O-methyladenosine-3'-phosphorothioate
  modified_base 20: mod_base = OTHER; note = 2'-O-methyluridine-3'-phosphorothioate
  modified_base 21: mod_base = OTHER; note = 2'-O-methyladenosine
tgattaactatcaagatgata

SEQ ID NO: 963 - RNA, 21 nt, synthetic construct
  source 1..21: mol_type = other RNA
  modified_base 1: mod_base = OTHER; note = 2'-O-methylcytidine-3'-phosphorothioate
  modified_base 2: mod_base = OTHER; note = 2'-O-methyladenosine-3'-phosphorothioate
  modified_base 3: mod_base = OTHER; note = 2'-O-methylguanosine-3'-phosphate
  modified_base 4: mod_base = OTHER; note = 2'-O-methyladenosine-3'-phosphate
  modified_base 5: mod_base = OTHER; note = 2'-O-methyladenosine-3'-phosphate
  modified_base 6: mod_base = OTHER; note = 2'-O-methylcytidine-3'-phosphate
  modified_base 7: mod_base = OTHER; note = 2'-deoxy-2'-fluorouridine-3'-phosphate
  modified_base 8: mod_base = OTHER; note = 2'-O-methyluridine-3'-phosphate
  modified_base 9: mod_base = OTHER; note = 2'-deoxy-2'-fluoroguanosine-3'-phosphate
  modified_base 10: mod_base = OTHER; note = 2'-deoxy-2'-fluorocytidine-3'-phosphate
  modified_base 11: mod_base = OTHER; note = 2'-deoxy-2'-fluorocytidine-3'-phosphate
  modified_base 12: mod_base = OTHER; note = 2'-O-methyladenosine-3'-phosphate
  modified_base 13: mod_base = OTHER; note = 2'-O-methylcytidine-3'-phosphate
  modified_base 14: mod_base = OTHER; note = 2'-O-methyladenosine-3'-phosphate
  modified_base 15: mod_base = OTHER; note = 2'-O-methylcytidine-3'-phosphate
  modified_base 16: mod_base = OTHER; note = 2'-O-methylguanosine-3'-phosphate
  modified_base 17: mod_base = OTHER; note = 2'-O-methyluridine-3'-phosphate
  modified_base 18: mod_base = OTHER; note = 2'-O-methylguanosine-3'-phosphate
  modified_base 19: mod_base = OTHER; note = 2'-O-methylcytidine-3'-phosphorothioate
  modified_base 20: mod_base = OTHER; note = 2'-O-methyladenosine-3'-phosphorothioate
  modified_base 21: mod_base = OTHER; note = 2'-O-methyladenosine
cagaacttgccacacgtgcaa

SEQ ID NO: 964 - RNA, 21 nt, synthetic construct
  source 1..21: mol_type = other RNA
  modified_base 1: mod_base = OTHER; note = 2'-O-methylcytidine-3'-phosphorothioate
  modified_base 2: mod_base = OTHER; note = 2'-O-methyladenosine-3'-phosphorothioate
  modified_base 3: mod_base = OTHER; note = 2'-O-methylcytidine-3'-phosphate
  modified_base 4: mod_base = OTHER; note = 2'-O-methyladenosine-3'-phosphate
  modified_base 5: mod_base = OTHER; note = 2'-O-methylcytidine-3'-phosphate
  modified_base 6: mod_base = OTHER; note = 2'-O-methylguanosine-3'-phosphate
  modified_base 7: mod_base = OTHER; note = 2'-deoxy-2'-fluorouridine-3'-phosphate
  modified_base 8: mod_base = OTHER; note = 2'-O-methylguanosine-3'-phosphate
  modified_base 9: mod_base = OTHER; note = 2'-deoxy-2'-fluorocytidine-3'-phosphate
  modified_base 10: mod_base = OTHER; note = 2'-deoxy-2'-fluoroadenosine-3'-phosphate
  modified_base 11: mod_base = OTHER; note = 2'-deoxy-2'-fluoroadenosine-3'-phosphate
  modified_base 12: mod_base = OTHER; note = 2'-O-methyluridine-3'-phosphate
  modified_base 13: mod_base = OTHER; note = 2'-O-methylcytidine-3'-phosphate
  modified_base 14: mod_base = OTHER; note = 2'-O-methylcytidine-3'-phosphate
  modified_base 15: mod_base = OTHER; note = 2'-O-methylcytidine-3'-phosphate
  modified_base 16: mod_base = OTHER; note = 2'-O-methyluridine-3'-phosphate
  modified_base 17: mod_base = OTHER; note = 2'-O-methylguanosine-3'-phosphate
  modified_base 18: mod_base = OTHER; note = 2'-O-methyladenosine-3'-phosphate
  modified_base 19: mod_base = OTHER; note = 2'-O-methyladenosine-3'-phosphorothioate
  modified_base 20: mod_base = OTHER; note = 2'-O-methylcytidine-3'-phosphorothioate
  modified_base 21: mod_base = OTHER; note = 2'-O-methyladenosine
cacacgtgcaatccctgaaca

SEQ ID NO: 965 - RNA, 21 nt, synthetic construct
  source 1..21: mol_type = other RNA
  modified_base 1: mod_base = OTHER; note = 2'-O-methylguanosine-3'-phosphorothioate
  modified_base 2: mod_base = OTHER; note = 2'-O-methyluridine-3'-phosphorothioate
  modified_base 3: mod_base = OTHER; note = 2'-O-methylguanosine-3'-phosphate
  modified_base 4: mod_base = OTHER; note = 2'-O-methylcytidine-3'-phosphate
  modified_base 5: mod_base = OTHER; note = 2'-O-methyladenosine-3'-phosphate
  modified_base 6: mod_base = OTHER; note = 2'-O-methyladenosine-3'-phosphate
  modified_base 7: mod_base = OTHER; note = 2'-deoxy-2'-fluorouridine-3'-phosphate
  modified_base 8: mod_base = OTHER; note = 2'-O-methylcytidine-3'-phosphate
  modified_base 9: mod_base = OTHER; note = 2'-deoxy-2'-fluorocytidine-3'-phosphate
  modified_base 10: mod_base = OTHER; note = 2'-deoxy-2'-fluorocytidine-3'-phosphate
  modified_base 11: mod_base = OTHER; note = 2'-deoxy-2'-fluorouridine-3'-phosphate
  modified_base 12: mod_base = OTHER; note = 2'-O-methylguanosine-3'-phosphate
  modified_base 13: mod_base = OTHER; note = 2'-O-methyladenosine-3'-phosphate
  modified_base 14: mod_base = OTHER; note = 2'-O-methyladenosine-3'-phosphate
  modified_base 15: mod_base = OTHER; note = 2'-O-methylcytidine-3'-phosphate
  modified_base 16: mod_base = OTHER; note = 2'-O-methyluridine-3'-phosphate
  modified_base 17: mod_base = OTHER; note = 2'-O-methylguanosine-3'-phosphate
  modified_base 18: mod_base = OTHER; note = 2'-O-methyladenosine-3'-phosphate
  modified_base 19: mod_base = OTHER; note = 2'-O-methylcytidine-3'-phosphorothioate
  modified_base 20: mod_base = OTHER; note = 2'-O-methyladenosine-3'-phosphorothioate
  modified_base 21: mod_base = OTHER; note = 2'-O-methyladenosine
gtgcaatccctgaactgacaa

SEQ ID NO: 966 - RNA, 21 nt, synthetic construct
  source 1..21: mol_type = other RNA
  modified_base 1: mod_base = OTHER; note = 2'-O-methylguanosine-3'-phosphorothioate
  modified_base 2: mod_base = OTHER; note = 2'-O-methyladenosine-3'-phosphorothioate
  modified_base 3: mod_base = OTHER; note = 2'-O-methylguanosine-3'-phosphate
  modified_base 4: mod_base = OTHER; note = 2'-O-methylguanosine-3'-phosphate
  modified_base 5: mod_base = OTHER; note = 2'-O-methyladenosine-3'-phosphate
  modified_base 6: mod_base = OTHER; note = 2'-O-methylcytidine-3'-phosphate
  modified_base 7: mod_base = OTHER; note = 2'-deoxy-2'-fluorocytidine-3'-phosphate
  modified_base 8: mod_base = OTHER; note = 2'-O-methyladenosine-3'-phosphate
  modified_base 9: mod_base = OTHER; note = 2'-deoxy-2'-fluoroguanosine-3'-phosphate
  modified_base 10: mod_base = OTHER; note = 2'-deoxy-2'-fluoroguanosine-3'-phosphate
  modified_base 11: mod_base = OTHER; note = 2'-deoxy-2'-fluorouridine-3'-phosphate
  modified_base 12: mod_base = OTHER; note = 2'-O-methylguanosine-3'-phosphate
  modified_base 13: mod_base = OTHER; note = 2'-O-methylguanosine-3'-phosphate
  modified_base 14: mod_base = OTHER; note = 2'-O-methyluridine-3'-phosphate
  modified_base 15: mod_base = OTHER; note = 2'-O-methylguanosine-3'-phosphate
  modified_base 16: mod_base = OTHER; note = 2'-O-methylguanosine-3'-phosphate
  modified_base 17: mod_base = OTHER; note = 2'-O-methyluridine-3'-phosphate
  modified_base 18: mod_base = OTHER; note = 2'-O-methyluridine-3'-phosphate
  modified_base 19: mod_base = OTHER; note = 2'-O-methyladenosine-3'-phosphorothioate
  modified_base 20: mod_base = OTHER; note = 2'-O-methyladenosine-3'-phosphorothioate
  modified_base 21: mod_base = OTHER; note = 2'-O-methyladenosine
gaggaccaggtggtggttaaa

SEQ ID NO: 967 - RNA, 21 nt, synthetic construct
  source 1..21: mol_type = other RNA
  modified_base 1: mod_base = OTHER; note = 2'-O-methylguanosine-3'-phosphorothioate
  modified_base 2: mod_base = OTHER; note = 2'-O-methyluridine-3'-phosphorothioate
  modified_base 3: mod_base = OTHER; note = 2'-O-methylguanosine-3'-phosphate
  modified_base 4: mod_base = OTHER; note = 2'-O-methylguanosine-3'-phosphate
  modified_base 5: mod_base = OTHER; note = 2'-O-methyluridine-3'-phosphate
  modified_base 6: mod_base = OTHER; note = 2'-O-methylguanosine-3'-phosphate
  modified_base 7: mod_base = OTHER; note = 2'-deoxy-2'-fluoroguanosine-3'-phosphate
  modified_base 8: mod_base = OTHER; note = 2'-O-methyluridine-3'-phosphate
  modified_base 9: mod_base = OTHER; note = 2'-deoxy-2'-fluorouridine-3'-phosphate
  modified_base 10: mod_base = OTHER; note = 2'-deoxy-2'-fluoroadenosine-3'-phosphate
  modified_base 11: mod_base = OTHER; note = 2'-deoxy-2'-fluoroadenosine-3'-phosphate
  modified_base 12: mod_base = OTHER; note = 2'-O-methyluridine-3'-phosphate
  modified_base 13: mod_base = OTHER; note = 2'-O-methyladenosine-3'-phosphate
  modified_base 14: mod_base = OTHER; note = 2'-O-methyladenosine-3'-phosphate
  modified_base 15: mod_base = OTHER; note = 2'-O-methylguanosine-3'-phosphate
  modified_base 16: mod_base = OTHER; note = 2'-O-methylguanosine-3'-phosphate
  modified_base 17: mod_base = OTHER; note = 2'-O-methylcytidine-3'-phosphate
  modified_base 18: mod_base = OTHER; note = 2'-O-methyluridine-3'-phosphate
  modified_base 19: mod_base = OTHER; note = 2'-O-methylguanosine-3'-phosphorothioate
  modified_base 20: mod_base = OTHER; note = 2'-O-methylcytidine-3'-phosphorothioate
  modified_base 21: mod_base = OTHER; note = 2'-O-methyladenosine
gtggtggttaataaggctgca

SEQ ID NO: 968 - RNA, 21 nt, synthetic construct
  source 1..21: mol_type = other RNA
  modified_base 1: mod_base = OTHER; note = 2'-O-methyluridine-3'-phosphorothioate
  modified_base 2: mod_base = OTHER; note = 2'-O-methylguanosine-3'-phosphorothioate
  modified_base 3: mod_base = OTHER; note = 2'-O-methylcytidine-3'-phosphate
  modified_base 4: mod_base = OTHER; note = 2'-O-methyladenosine-3'-phosphate
  modified_base 5: mod_base = OTHER; note = 2'-O-methylguanosine-3'-phosphate
  modified_base 6: mod_base = OTHER; note = 2'-O-methyladenosine-3'-phosphate
  modified_base 7: mod_base = OTHER; note = 2'-deoxy-2'-fluoroadenosine-3'-phosphate
  modified_base 8: mod_base = OTHER; note = 2'-O-methyluridine-3'-phosphate
  modified_base 9: mod_base = OTHER; note = 2'-deoxy-2'-fluoroadenosine-3'-phosphate
  modified_base 10: mod_base = OTHER; note = 2'-deoxy-2'-fluorocytidine-3'-phosphate
  modified_base 11: mod_base = OTHER; note = 2'-deoxy-2'-fluoroadenosine-3'-phosphate
  modified_base 12: mod_base = OTHER; note = 2'-O-methyladenosine-3'-phosphate
  modified_base 13: mod_base = OTHER; note = 2'-O-methyladenosine-3'-phosphate
  modified_base 14: mod_base = OTHER; note = 2'-O-methyluridine-3'-phosphate
  modified_base 15: mod_base = OTHER; note = 2'-O-methylguanosine-3'-phosphate
  modified_base 16: mod_base = OTHER; note = 2'-O-methyladenosine-3'-phosphate
  modified_base 17: mod_base = OTHER; note = 2'-O-methyluridine-3'-phosphate
  modified_base 18: mod_base = OTHER; note = 2'-O-methylguanosine-3'-phosphate
  modified_base 19: mod_base = OTHER; note = 2'-O-methyluridine-3'-phosphorothioate
  modified_base 20: mod_base = OTHER; note = 2'-O-methyladenosine-3'-phosphorothioate
  modified_base 21: mod_base = OTHER; note = 2'-O-methyladenosine
tgcagaatacaaatgatgtaa

SEQ ID NO: 969 - RNA, 21 nt, synthetic construct
  source 1..21: mol_type = other RNA
  modified_base 1: mod_base = OTHER; note = 2'-O-methyladenosine-3'-phosphorothioate
  modified_base 2: mod_base = OTHER; note = 2'-O-methylguanosine-3'-phosphorothioate
  modified_base 3: mod_base = OTHER; note = 2'-O-methyladenosine-3'-phosphate
  modified_base 4: mod_base = OTHER; note = 2'-O-methyladenosine-3'-phosphate
  modified_base 5: mod_base = OTHER; note = 2'-O-methyluridine-3'-phosphate
  modified_base 6: mod_base = OTHER; note = 2'-O-methyladenosine-3'-phosphate
  modified_base 7: mod_base = OTHER; note = 2'-deoxy-2'-fluorocytidine-3'-phosphate
  modified_base 8: mod_base = OTHER; note = 2'-O-methyladenosine-3'-phosphate
  modified_base 9: mod_base = OTHER; note = 2'-deoxy-2'-fluoroadenosine-3'-phosphate
  modified_base 10: mod_base = OTHER; note = 2'-deoxy-2'-fluoroadenosine-3'-phosphate
  modified_base 11: mod_base = OTHER; note = 2'-deoxy-2'-fluorouridine-3'-phosphate
  modified_base 12: mod_base = OTHER; note = 2'-O-methylguanosine-3'-phosphate
  modified_base 13: mod_base = OTHER; note = 2'-O-methyladenosine-3'-phosphate
  modified_base 14: mod_base = OTHER; note = 2'-O-methyluridine-3'-phosphate
  modified_base 15: mod_base = OTHER; note = 2'-O-methylguanosine-3'-phosphate
  modified_base 16: mod_base = OTHER; note = 2'-O-methyluridine-3'-phosphate
  modified_base 17: mod_base = OTHER; note = 2'-O-methyladenosine-3'-phosphate
  modified_base 18: mod_base = OTHER; note = 2'-O-methylguanosine-3'-phosphate
  modified_base 19: mod_base = OTHER; note = 2'-O-methyladenosine-3'-phosphorothioate
  modified_base 20: mod_base = OTHER; note = 2'-O-methyladenosine-3'-phosphorothioate
  modified_base 21: mod_base = OTHER; note = 2'-O-methyladenosine
agaatacaaatgatgtagaaa

SEQ ID NO: 970 - RNA, 21 nt, synthetic construct
  source 1..21: mol_type = other RNA
  modified_base 1: mod_base = OTHER; note = 2'-O-methyluridine-3'-phosphorothioate
  modified_base 2: mod_base = OTHER; note = 2'-O-methylguanosine-3'-phosphorothioate
  modified_base 3: mod_base = OTHER; note = 2'-O-methyladenosine-3'-phosphate
  modified_base 4: mod_base = OTHER; note = 2'-O-methyluridine-3'-phosphate
  modified_base 5: mod_base = OTHER; note = 2'-O-methylguanosine-3'-phosphate
  modified_base 6: mod_base = OTHER; note = 2'-O-methyluridine-3'-phosphate
  modified_base 7: mod_base = OTHER; note = 2'-deoxy-2'-fluoroadenosine-3'-phosphate
  modified_base 8: mod_base = OTHER; note = 2'-O-methylguanosine-3'-phosphate
  modified_base 9: mod_base = OTHER; note = 2'-deoxy-2'-fluoroadenosine-3'-phosphate
  modified_base 10: mod_base = OTHER; note = 2'-deoxy-2'-fluoroadenosine-3'-phosphate
  modified_base 11: mod_base = OTHER; note = 2'-deoxy-2'-fluoroadenosine-3'-phosphate
  modified_base 12: mod_base = OTHER; note = 2'-O-methylcytidine-3'-phosphate
  modified_base 13: mod_base = OTHER; note = 2'-O-methyladenosine-3'-phosphate
  modified_base 14: mod_base = OTHER; note = 2'-O-methylguanosine-3'-phosphate
  modified_base 15: mod_base = OTHER; note = 2'-O-methylcytidine-3'-phosphate
  modified_base 16: mod_base = OTHER; note = 2'-O-methyluridine-3'-phosphate
  modified_base 17: mod_base = OTHER; note = 2'-O-methylcytidine-3'-phosphate
  modified_base 18: mod_base = OTHER; note = 2'-O-methylguanosine-3'-phosphate
  modified_base 19: mod_base = OTHER; note = 2'-O-methyluridine-3'-phosphorothioate
  modified_base 20: mod_base = OTHER; note = 2'-O-methyluridine-3'-phosphorothioate
  modified_base 21: mod_base = OTHER; note = 2'-O-methyladenosine
tgatgtagaaacagctcgtta

SEQ ID NO: 971 - RNA, 21 nt, synthetic construct
  source 1..21: mol_type = other RNA
  modified_base 1: mod_base = OTHER; note = 2'-O-methylcytidine-3'-phosphorothioate
  modified_base 2: mod_base = OTHER; note = 2'-O-methyluridine-3'-phosphorothioate
  modified_base 3: mod_base = OTHER; note = 2'-O-methyluridine-3'-phosphate
  modified_base 4: mod_base = OTHER; note = 2'-O-methylguanosine-3'-phosphate
  modified_base 5: mod_base = OTHER; note = 2'-O-methylcytidine-3'-phosphate
  modified_base 6: mod_base = OTHER; note = 2'-O-methyladenosine-3'-phosphate
  modified_base 7: mod_base = OTHER; note = 2'-deoxy-2'-fluorouridine-3'-phosphate
  modified_base 8: mod_base = OTHER; note = 2'-O-methyladenosine-3'-phosphate
  modified_base 9: mod_base = OTHER; note = 2'-deoxy-2'-fluoroadenosine-3'-phosphate
  modified_base 10: mod_base = OTHER; note = 2'-deoxy-2'-fluorocytidine-3'-phosphate
  modified_base 11: mod_base = OTHER; note = 2'-deoxy-2'-fluorocytidine-3'-phosphate
  modified_base 12: mod_base = OTHER; note = 2'-O-methyluridine-3'-phosphate
  modified_base 13: mod_base = OTHER; note = 2'-O-methyluridine-3'-phosphate
  modified_base 14: mod_base = OTHER; note = 2'-O-methyluridine-3'-phosphate
  modified_base 15: mod_base = OTHER; note = 2'-O-methylcytidine-3'-phosphate
  modified_base 16: mod_base = OTHER; note = 2'-O-methylcytidine-3'-phosphate
  modified_base 17: mod_base = OTHER; note = 2'-O-methylcytidine-3'-phosphate
  modified_base 18: mod_base = OTHER; note = 2'-O-methyladenosine-3'-phosphate
  modified_base 19: mod_base = OTHER; note = 2'-O-methyluridine-3'-phosphorothioate
  modified_base 20: mod_base = OTHER; note = 2'-O-methylcytidine-3'-phosphorothioate
  modified_base 21: mod_base = OTHER; note = 2'-O-methyladenosine
cttgcataacctttcccatca

SEQ ID NO: 972 - RNA, 21 nt, synthetic construct
  source 1..21: mol_type = other RNA
  modified_base 1: mod_base = OTHER; note = 2'-O-methyluridine-3'-phosphorothioate
  modified_base 2: mod_base = OTHER; note = 2'-O-methyluridine-3'-phosphorothioate
  modified_base 3: mod_base = OTHER; note = 2'-O-methylguanosine-3'-phosphate
  modified_base 4: mod_base = OTHER; note = 2'-O-methylcytidine-3'-phosphate
  modified_base 5: mod_base = OTHER; note = 2'-O-methyladenosine-3'-phosphate
  modified_base 6: mod_base = OTHER; note = 2'-O-methyluridine-3'-phosphate
  modified_base 7: mod_base = OTHER; note = 2'-deoxy-2'-fluoroadenosine-3'-phosphate
  modified_base 8: mod_base = OTHER; note = 2'-O-methyladenosine-3'-phosphate
  modified_base 9: mod_base = OTHER; note = 2'-deoxy-2'-fluorocytidine-3'-phosphate
  modified_base 10: mod_base = OTHER; note = 2'-deoxy-2'-fluorocytidine-3'-phosphate
  modified_base 11: mod_base = OTHER; note = 2'-deoxy-2'-fluorouridine-3'-phosphate
  modified_base 12: mod_base = OTHER; note = 2'-O-methyluridine-3'-phosphate
  modified_base 13: mod_base = OTHER; note = 2'-O-methyluridine-3'-phosphate
  modified_base 14: mod_base = OTHER; note = 2'-O-methylcytidine-3'-phosphate
  modified_base 15: mod_base = OTHER; note = 2'-O-methylcytidine-3'-phosphate
  modified_base 16: mod_base = OTHER; note = 2'-O-methylcytidine-3'-phosphate
  modified_base 17: mod_base = OTHER; note = 2'-O-methyladenosine-3'-phosphate
  modified_base 18: mod_base = OTHER; note = 2'-O-methyluridine-3'-phosphate
  modified_base 19: mod_base = OTHER; note = 2'-O-methylcytidine-3'-phosphorothioate
  modified_base 20: mod_base = OTHER; note = 2'-O-methyladenosine-3'-phosphorothioate
  modified_base 21: mod_base = OTHER; note = 2'-O-methyladenosine
ttgcataacctttcccatcaa

SEQ ID NO: 973 - RNA, 21 nt, synthetic construct
  source 1..21: mol_type = other RNA
  modified_base 1: mod_base = OTHER; note = 2'-O-methylcytidine-3'-phosphorothioate
  modified_base 2: mod_base = OTHER; note = 2'-O-methylcytidine-3'-phosphorothioate
  modified_base 3: mod_base = OTHER; note = 2'-O-methyladenosine-3'-phosphate
  modified_base 4: mod_base = OTHER; note = 2'-O-methyluridine-3'-phosphate
  modified_base 5: mod_base = OTHER; note = 2'-O-methylcytidine-3'-phosphate
  modified_base 6: mod_base = OTHER; note = 2'-O-methyluridine-3'-phosphate
  modified_base 7: mod_base = OTHER; note = 2'-deoxy-2'-fluorouridine-3'-phosphate
  modified_base 8: mod_base = OTHER; note = 2'-O-methyluridine-3'-phosphate
  modified_base 9: mod_base = OTHER; note = 2'-deoxy-2'-fluoroadenosine-3'-phosphate
  modified_base 10: mod_base = OTHER; note = 2'-deoxy-2'-fluoroadenosine-3'-phosphate
  modified_base 11: mod_base = OTHER; note = 2'-deoxy-2'-fluoroguanosine-3'-phosphate
  modified_base 12: mod_base = OTHER; note = 2'-O-methyluridine-3'-phosphate
  modified_base 13: mod_base = OTHER; note = 2'-O-methylcytidine-3'-phosphate
  modified_base 14: mod_base = OTHER; note = 2'-O-methyluridine-3'-phosphate
  modified_base 15: mod_base = OTHER; note = 2'-O-methylguanosine-3'-phosphate
  modified_base 16: mod_base = OTHER; note = 2'-O-methylguanosine-3'-phosphate
  modified_base 17: mod_base = OTHER; note = 2'-O-methyladenosine-3'-phosphate
  modified_base 18: mod_base = OTHER; note = 2'-O-methylguanosine-3'-phosphate
  modified_base 19: mod_base = OTHER; note = 2'-O-methylguanosine-3'-phosphorothioate
  modified_base 20: mod_base = OTHER; note = 2'-O-methylcytidine-3'-phosphorothioate
  modified_base 21: mod_base = OTHER; note = 2'-O-methyladenosine
ccatctttaagtctggaggca

SEQ ID NO: 974 - RNA, 21 nt, synthetic construct
  source 1..21: mol_type = other RNA
  modified_base 1: mod_base = OTHER; note = 2'-O-methylguanosine-3'-phosphorothioate
  modified_base 2: mod_base = OTHER; note = 2'-O-methylcytidine-3'-phosphorothioate
  modified_base 3: mod_base = OTHER; note = 2'-O-methylcytidine-3'-phosphate
  modified_base 4: mod_base = OTHER; note = 2'-O-methyladenosine-3'-phosphate
  modified_base 5: mod_base = OTHER; note = 2'-O-methyluridine-3'-phosphate
  modified_base 6: mod_base = OTHER; note = 2'-O-methyluridine-3'-phosphate
  modified_base 7: mod_base = OTHER; note = 2'-deoxy-2'-fluoroadenosine-3'-phosphate
  modified_base 8: mod_base = OTHER; note = 2'-O-methylcytidine-3'-phosphate
  modified_base 9: mod_base = OTHER; note = 2'-deoxy-2'-fluoroadenosine-3'-phosphate
  modified_base 10: mod_base = OTHER; note = 2'-deoxy-2'-fluoroadenosine-3'-phosphate
  modified_base 11: mod_base = OTHER; note = 2'-deoxy-2'-fluorocytidine-3'-phosphate
  modified_base 12: mod_base = OTHER; note = 2'-O-methyluridine-3'-phosphate
  modified_base 13: mod_base = OTHER; note = 2'-O-methylcytidine-3'-phosphate
  modified_base 14: mod_base = OTHER; note = 2'-O-methyluridine-3'-phosphate
  modified_base 15: mod_base = OTHER; note = 2'-O-methylcytidine-3'-phosphate
  modified_base 16: mod_base = OTHER; note = 2'-O-methylcytidine-3'-phosphate
  modified_base 17: mod_base = OTHER; note = 2'-O-methyladenosine-3'-phosphate
  modified_base 18: mod_base = OTHER; note = 2'-O-methylcytidine-3'-phosphate
  modified_base 19: mod_base = OTHER; note = 2'-O-methyladenosine-3'-phosphorothioate
  modified_base 20: mod_base = OTHER; note = 2'-O-methyladenosine-3'-phosphorothioate
  modified_base 21: mod_base = OTHER; note = 2'-O-methyladenosine
gccattacaactctccacaaa

SEQ ID NO: 975 - RNA, 21 nt, synthetic construct
  source 1..21: mol_type = other RNA
  modified_base 1: mod_base = OTHER; note = 2'-O-methylguanosine-3'-phosphorothioate
  modified_base 2: mod_base = OTHER; note = 2'-O-methyluridine-3'-phosphorothioate
  modified_base 3: mod_base = OTHER; note = 2'-O-methyluridine-3'-phosphate
  modified_base 4: mod_base = OTHER; note = 2'-O-methylguanosine-3'-phosphate
  modified_base 5: mod_base = OTHER; note = 2'-O-methylcytidine-3'-phosphate
  modified_base 6: mod_base = OTHER; note = 2'-O-methylcytidine-3'-phosphate
  modified_base 7: mod_base = OTHER; note = 2'-deoxy-2'-fluorouridine-3'-phosphate
  modified_base 8: mod_base = OTHER; note = 2'-O-methyluridine-3'-phosphate
  modified_base 9: mod_base = OTHER; note = 2'-deoxy-2'-fluoroguanosine-3'-phosphate
  modified_base 10: mod_base = OTHER; note = 2'-deoxy-2'-fluorocytidine-3'-phosphate
  modified_base 11: mod_base = OTHER; note = 2'-deoxy-2'-fluorouridine-3'-phosphate
  modified_base 12: mod_base = OTHER; note = 2'-O-methylcytidine-3'-phosphate
  modified_base 13: mod_base = OTHER; note = 2'-O-methyladenosine-3'-phosphate
  modified_base 14: mod_base = OTHER; note = 2'-O-methyladenosine-3'-phosphate
  modified_base 15: mod_base = OTHER; note = 2'-O-methylcytidine-3'-phosphate
  modified_base 16: mod_base = OTHER; note = 2'-O-methyladenosine-3'-phosphate
  modified_base 17: mod_base = OTHER; note = 2'-O-methyladenosine-3'-phosphate
  modified_base 18: mod_base = OTHER; note = 2'-O-methyladenosine-3'-phosphate
  modified_base 19: mod_base = OTHER; note = 2'-O-methyladenosine-3'-phosphorothioate
  modified_base 20: mod_base = OTHER; note = 2'-O-methylcytidine-3'-phosphorothioate
  modified_base 21: mod_base = OTHER; note = 2'-O-methyladenosine
gttgccttgctcaacaaaaca

SEQ ID NO: 976 - RNA, 21 nt, synthetic construct
  source 1..21: mol_type = other RNA
  modified_base 1: mod_base = OTHER; note = 2'-O-methyladenosine-3'-phosphorothioate
  modified_base 2: mod_base = OTHER; note = 2'-O-methyluridine-3'-phosphorothioate
  modified_base 3: mod_base = OTHER; note = 2'-O-methyluridine-3'-phosphate
  modified_base 4: mod_base = OTHER; note = 2'-O-methylcytidine-3'-phosphate
  modified_base 5: mod_base = OTHER; note = 2'-O-methyluridine-3'-phosphate
  modified_base 6: mod_base = OTHER; note = 2'-O-methyluridine-3'-phosphate
  modified_base 7: mod_base = OTHER; note = 2'-deoxy-2'-fluoroguanosine-3'-phosphate
  modified_base 8: mod_base = OTHER; note = 2'-O-methylguanosine-3'-phosphate
  modified_base 9: mod_base = OTHER; note = 2'-deoxy-2'-fluorocytidine-3'-phosphate
  modified_base 10: mod_base = OTHER; note = 2'-deoxy-2'-fluorouridine-3'-phosphate
  modified_base 11: mod_base = OTHER; note = 2'-deoxy-2'-fluoroadenosine-3'-phosphate
  modified_base 12: mod_base = OTHER; note = 2'-O-methyluridine-3'-phosphate
  modified_base 13: mod_base = OTHER; note = 2'-O-methyluridine-3'-phosphate
  modified_base 14: mod_base = OTHER; note = 2'-O-methyladenosine-3'-phosphate
  modified_base 15: mod_base = OTHER; note = 2'-O-methylcytidine-3'-phosphate
  modified_base 16: mod_base = OTHER; note = 2'-O-methylguanosine-3'-phosphate
  modified_base 17: mod_base = OTHER; note = 2'-O-methyladenosine-3'-phosphate
  modified_base 18: mod_base = OTHER; note = 2'-O-methylcytidine-3'-phosphate
  modified_base 19: mod_base = OTHER; note = 2'-O-methyladenosine-3'-phosphorothioate
  modified_base 20: mod_base = OTHER; note = 2'-O-methylguanosine-3'-phosphorothioate
  modified_base 21: mod_base = OTHER; note = 2'-O-methyladenosine
attcttggctattacgacaga

SEQ ID NO: 977 - RNA, 21 nt, synthetic construct
  source 1..21: mol_type = other RNA
  modified_base 1: mod_base = OTHER; note = 2'-O-methyladenosine-3'-phosphorothioate
  modified_base 2: mod_base = OTHER; note = 2'-O-methyladenosine-3'-phosphorothioate
  modified_base 3: mod_base = OTHER; note = 2'-O-methyladenosine-3'-phosphate
  modified_base 4: mod_base = OTHER; note = 2'-O-methyluridine-3'-phosphate
  modified_base 5: mod_base = OTHER; note = 2'-O-methyladenosine-3'-phosphate
  modified_base 6: mod_base = OTHER; note = 2'-O-methyluridine-3'-phosphate
  modified_base 7: mod_base = OTHER; note = 2'-deoxy-2'-fluoroadenosine-3'-phosphate
  modified_base 8: mod_base = OTHER; note = 2'-O-methyladenosine-3'-phosphate
  modified_base 9: mod_base = OTHER; note = 2'-deoxy-2'-fluorouridine-3'-phosphate
  modified_base 10: mod_base = OTHER; note = 2'-deoxy-2'-fluoroguanosine-3'-phosphate
  modified_base 11: mod_base = OTHER; note = 2'-deoxy-2'-fluoroadenosine-3'-phosphate
  modified_base 12: mod_base = OTHER; note = 2'-O-methylguanosine-3'-phosphate
  modified_base 13: mod_base = OTHER; note = 2'-O-methylguanosine-3'-phosphate
  modified_base 14: mod_base = OTHER; note = 2'-O-methyladenosine-3'-phosphate
  modified_base 15: mod_base = OTHER; note = 2'-O-methylcytidine-3'-phosphate
  modified_base 16: mod_base = OTHER; note = 2'-O-methylcytidine-3'-phosphate
  modified_base 17: mod_base = OTHER; note = 2'-O-methyluridine-3'-phosphate
  modified_base 18: mod_base = OTHER; note = 2'-O-methyladenosine-3'-phosphate
  modified_base 19: mod_base = OTHER; note = 2'-O-methyluridine-3'-phosphorothioate
  modified_base 20: mod_base = OTHER; note = 2'-O-methyladenosine-3'-phosphorothioate
  modified_base 21: mod_base = OTHER; note = 2'-O-methyladenosine
aaatataatgaggacctataa

SEQ ID NO: 978 - RNA, 21 nt, synthetic construct
  source 1..21: mol_type = other RNA
  modified_base 1: mod_base = OTHER; note = 2'-O-methyladenosine-3'-phosphorothioate
  modified_base 2: mod_base = OTHER; note = 2'-O-methyladenosine-3'-phosphorothioate
  modified_base 3: mod_base = OTHER; note = 2'-O-methyluridine-3'-phosphate
  modified_base 4: mod_base = OTHER; note = 2'-O-methyladenosine-3'-phosphate
  modified_base 5: mod_base = OTHER; note = 2'-O-methyluridine-3'-phosphate
  modified_base 6: mod_base = OTHER; note = 2'-O-methyladenosine-3'-phosphate
  modified_base 7: mod_base = OTHER; note = 2'-deoxy-2'-fluoroadenosine-3'-phosphate
  modified_base 8: mod_base = OTHER; note = 2'-O-methyluridine-3'-phosphate
  modified_base 9: mod_base = OTHER; note = 2'-deoxy-2'-fluoroguanosine-3'-phosphate
  modified_base 10: mod_base = OTHER; note = 2'-deoxy-2'-fluoroadenosine-3'-phosphate
  modified_base 11: mod_base = OTHER; note = 2'-deoxy-2'-fluoroguanosine-3'-phosphate
  modified_base 12: mod_base = OTHER; note = 2'-O-methylguanosine-3'-phosphate
  modified_base 13: mod_base = OTHER; note = 2'-O-methyladenosine-3'-phosphate
  modified_base 14: mod_base = OTHER; note = 2'-O-methylcytidine-3'-phosphate
  modified_base 15: mod_base = OTHER; note = 2'-O-methylcytidine-3'-phosphate
  modified_base 16: mod_base = OTHER; note = 2'-O-methyluridine-3'-phosphate
  modified_base 17: mod_base = OTHER; note = 2'-O-methyladenosine-3'-phosphate
  modified_base 18: mod_base = OTHER; note = 2'-O-methyluridine-3'-phosphate
  modified_base 19: mod_base = OTHER; note = 2'-O-methyladenosine-3'-phosphorothioate
  modified_base 20: mod_base = OTHER; note = 2'-O-methylcytidine-3'-phosphorothioate
  modified_base 21: mod_base = OTHER; note = 2'-O-methyladenosine
aatataatgaggacctataca

SEQ ID NO: 979 - RNA, 21 nt, synthetic construct
  source 1..21: mol_type = other RNA
  modified_base 1: mod_base = OTHER; note = 2'-O-methylguanosine-3'-phosphorothioate
  modified_base 2: mod_base = OTHER; note = 2'-O-methylcytidine-3'-phosphorothioate
  modified_base 3: mod_base = OTHER; note = 2'-O-methyladenosine-3'-phosphate
  modified_base 4: mod_base = OTHER; note = 2'-O-methylguanosine-3'-phosphate
  modified_base 5: mod_base = OTHER; note = 2'-O-methyladenosine-3'-phosphate
  modified_base 6: mod_base = OTHER; note = 2'-O-methylguanosine-3'-phosphate
  modified_base 7: mod_base = OTHER; note = 2'-deoxy-2'-fluorouridine-3'-phosphate
  modified_base 8: mod_base = OTHER; note = 2'-O-methylguanosine-3'-phosphate
  modified_base 9: mod_base = OTHER; note = 2'-deoxy-2'-fluorocytidine-3'-phosphate
  modified_base 10: mod_base = OTHER; note = 2'-deoxy-2'-fluorouridine-3'-phosphate
  modified_base 11: mod_base = OTHER; note = 2'-deoxy-2'-fluoroguanosine-3'-phosphate
  modified_base 12: mod_base = OTHER; note = 2'-O-methyladenosine-3'-phosphate
  modified_base 13: mod_base = OTHER; note = 2'-O-methyladenosine-3'-phosphate
  modified_base 14: mod_base = OTHER; note = 2'-O-methylguanosine-3'-phosphate
  modified_base 15: mod_base = OTHER; note = 2'-O-methylguanosine-3'-phosphate
  modified_base 16: mod_base = OTHER; note = 2'-O-methyluridine-3'-phosphate
  modified_base 17: mod_base = OTHER; note = 2'-O-methylguanosine-3'-phosphate
  modified_base 18: mod_base = OTHER; note = 2'-O-methylcytidine-3'-phosphate
  modified_base 19: mod_base = OTHER; note = 2'-O-methyluridine-3'-phosphorothioate
  modified_base 20: mod_base = OTHER; note = 2'-O-methyladenosine-3'-phosphorothioate
  modified_base 21: mod_base = OTHER; note = 2'-O-methyladenosine
gcagagtgctgaaggtgctaa

SEQ ID NO: 980 - RNA, 21 nt, synthetic construct
  source 1..21: mol_type = other RNA
  modified_base 1: mod_base = OTHER; note = 2'-O-methyluridine-3'-phosphorothioate
  modified_base 2: mod_base = OTHER; note = 2'-O-methyluridine-3'-phosphorothioate
  modified_base 3: mod_base = OTHER; note = 2'-O-methylcytidine-3'-phosphate
  modified_base 4: mod_base = OTHER; note = 2'-O-methyluridine-3'-phosphate
  modified_base 5: mod_base = OTHER; note = 2'-O-methylguanosine-3'-phosphate
  modified_base 6: mod_base = OTHER; note = 2'-O-methylguanosine-3'-phosphate
  modified_base 7: mod_base = OTHER; note = 2'-deoxy-2'-fluoroguanosine-3'-phosphate
  modified_base 8: mod_base = OTHER; note = 2'-O-methyluridine-3'-phosphate
  modified_base 9: mod_base = OTHER; note = 2'-deoxy-2'-fluorouridine-3'-phosphate
  modified_base 10: mod_base = OTHER; note = 2'-deoxy-2'-fluorocytidine-3'-phosphate
  modified_base 11: mod_base = OTHER; note = 2'-deoxy-2'-fluoroadenosine-3'-phosphate
  modified_base 12: mod_base = OTHER; note = 2'-O-methylguanosine-3'-phosphate
  modified_base 13: mod_base = OTHER; note = 2'-O-methyladenosine-3'-phosphate
  modified_base 14: mod_base = OTHER; note = 2'-O-methyluridine-3'-phosphate
  modified_base 15: mod_base = OTHER; note = 2'-O-methylguanosine-3'-phosphate
  modified_base 16: mod_base = OTHER; note = 2'-O-methyladenosine-3'-phosphate
  modified_base 17: mod_base = OTHER; note = 2'-O-methyluridine-3'-phosphate
  modified_base 18: mod_base = OTHER; note = 2'-O-methyladenosine-3'-phosphate
  modified_base 19: mod_base = OTHER; note = 2'-O-methyluridine-3'-phosphorothioate
  modified_base 20: mod_base = OTHER; note = 2'-O-methyladenosine-3'-phosphorothioate
  modified_base 21: mod_base = OTHER; note = 2'-O-methyladenosine
ttctgggttcagatgatataa

SEQ ID NO: 981 - RNA, 21 nt, synthetic construct
  source 1..21: mol_type = other RNA
  modified_base 1: mod_base = OTHER; note = 2'-O-methylguanosine-3'-phosphorothioate
  modified_base 2: mod_base = OTHER; note = 2'-O-methyladenosine-3'-phosphorothioate
  modified_base 3: mod_base = OTHER; note = 2'-O-methyluridine-3'-phosphate
  modified_base 4: mod_base = OTHER; note = 2'-O-methylguanosine-3'-phosphate
  modified_base 5: mod_base = OTHER; note = 2'-O-methyladenosine-3'-phosphate
  modified_base 6: mod_base = OTHER; note = 2'-O-methyluridine-3'-phosphate
  modified_base 7: mod_base = OTHER; note = 2'-deoxy-2'-fluoroadenosine-3'-phosphate
  modified_base 8: mod_base = OTHER; note = 2'-O-methyluridine-3'-phosphate
  modified_base 9: mod_base = OTHER; note = 2'-deoxy-2'-fluoroadenosine-3'-phosphate
  modified_base 10: mod_base = OTHER; note = 2'-deoxy-2'-fluoroadenosine-3'-phosphate
  modified_base 11: mod_base = OTHER; note = 2'-deoxy-2'-fluoroadenosine-3'-phosphate
  modified_base 12: mod_base = OTHER; note = 2'-O-methyluridine-3'-phosphate
  modified_base 13: mod_base = OTHER; note = 2'-O-methylguanosine-3'-phosphate
  modified_base 14: mod_base = OTHER; note = 2'-O-methyluridine-3'-phosphate
  modified_base 15: mod_base = OTHER; note = 2'-O-methylguanosine-3'-phosphate
  modified_base 16: mod_base = OTHER; note = 2'-O-methylguanosine-3'-phosphate
  modified_base 17: mod_base = OTHER; note = 2'-O-methyluridine-3'-phosphate
  modified_base 18: mod_base = OTHER; note = 2'-O-methylcytidine-3'-phosphate
  modified_base 19: mod_base = OTHER; note = 2'-O-methyladenosine-3'-phosphorothioate
  modified_base 20: mod_base = OTHER; note = 2'-O-methylcytidine-3'-phosphorothioate
  modified_base 21: mod_base = OTHER; note = 2'-O-methyladenosine
gatgatataaatgtggtcaca

SEQ ID NO: 982 - RNA, 21 nt, synthetic construct
  source 1..21: mol_type = other RNA
  modified_base 1: mod_base = OTHER; note = 2'-O-methylguanosine-3'-phosphorothioate
  modified_base 2: mod_base = OTHER; note = 2'-O-methylguanosine-3'-phosphorothioate
  modified_base 3: mod_base = OTHER; note = 2'-O-methyladenosine-3'-phosphate
  modified_base 4: mod_base = OTHER; note = 2'-O-methyladenosine-3'-phosphate
  modified_base 5: mod_base = OTHER; note = 2'-O-methyluridine-3'-phosphate
  modified_base 6: mod_base = OTHER; note = 2'-O-methyluridine-3'-phosphate
  modified_base 7: mod_base = OTHER; note = 2'-deoxy-2'-fluorocytidine-3'-phosphate
  modified_base 8: mod_base = OTHER; note = 2'-O-methyluridine-3'-phosphate
  modified_base 9: mod_base = OTHER; note = 2'-deoxy-2'-fluorouridine-3'-phosphate
  modified_base 10: mod_base = OTHER; note = 2'-deoxy-2'-fluorouridine-3'-phosphate
  modified_base 11: mod_base = OTHER; note = 2'-deoxy-2'-fluorocytidine-3'-phosphate
  modified_base 12: mod_base = OTHER; note = 2'-O-methyluridine-3'-phosphate
  modified_base 13: mod_base = OTHER; note = 2'-O-methyladenosine-3'-phosphate
  modified_base 14: mod_base = OTHER; note = 2'-O-methyladenosine-3'-phosphate
  modified_base 15: mod_base = OTHER; note = 2'-O-methylcytidine-3'-phosphate
  modified_base 16: mod_base = OTHER; note = 2'-O-methylcytidine-3'-phosphate
  modified_base 17: mod_base = OTHER; note = 2'-O-methyluridine-3'-phosphate
  modified_base 18: mod_base = OTHER; note = 2'-O-methylcytidine-3'-phosphate
  modified_base 19: mod_base = OTHER; note = 2'-O-methyladenosine-3'-phosphorothioate
  modified_base 20: mod_base = OTHER; note = 2'-O-methylcytidine-3'-phosphorothioate
  modified_base 21: mod_base = OTHER; note = 2'-O-methyladenosine
ggaattctttctaacctcaca

SEQ ID NO: 983 - RNA, 21 nt, synthetic construct
  source 1..21: mol_type = other RNA
  modified_base 1: mod_base = OTHER; note = 2'-O-methyluridine-3'-phosphorothioate
  modified_base 2: mod_base = OTHER; note = 2'-O-methylcytidine-3'-phosphorothioate
  modified_base 3: mod_base = OTHER; note = 2'-O-methyluridine-3'-phosphate
  modified_base 4: mod_base = OTHER; note = 2'-O-methyluridine-3'-phosphate
  modified_base 5: mod_base = OTHER; note = 2'-O-methyluridine-3'-phosphate
  modified_base 6: mod_base = OTHER; note = 2'-O-methylcytidine-3'-phosphate
  modified_base 7: mod_base = OTHER; note = 2'-deoxy-2'-fluorouridine-3'-phosphate
  modified_base 8: mod_base = OTHER; note = 2'-O-methyladenosine-3'-phosphate
  modified_base 9: mod_base = OTHER; note = 2'-deoxy-2'-fluoroadenosine-3'-phosphate
  modified_base 10: mod_base = OTHER; note = 2'-deoxy-2'-fluorocytidine-3'-phosphate
  modified_base 11: mod_base = OTHER; note = 2'-deoxy-2'-fluorocytidine-3'-phosphate
  modified_base 12: mod_base = OTHER; note = 2'-O-methyluridine-3'-phosphate
  modified_base 13: mod_base = OTHER; note = 2'-O-methylcytidine-3'-phosphate
  modified_base 14: mod_base = OTHER; note = 2'-O-methyladenosine-3'-phosphate
  modified_base 15: mod_base = OTHER; note = 2'-O-methylcytidine-3'-phosphate
  modified_base 16: mod_base = OTHER; note = 2'-O-methyluridine-3'-phosphate
  modified_base 17: mod_base = OTHER; note = 2'-O-methyluridine-3'-phosphate
  modified_base 18: mod_base = OTHER; note = 2'-O-methylguanosine-3'-phosphate
  modified_base 19: mod_base = OTHER; note = 2'-O-methylcytidine-3'-phosphorothioate
  modified_base 20: mod_base = OTHER; note = 2'-O-methyladenosine-3'-phosphorothioate
  modified_base 21: mod_base = OTHER; note = 2'-O-methyladenosine
tctttctaacctcacttgcaa

SEQ ID NO: 984 - RNA, 21 nt, synthetic construct
  source 1..21: mol_type = other RNA
  modified_base 1: mod_base = OTHER; note = 2'-O-methyluridine-3'-phosphorothioate
  modified_base 2: mod_base = OTHER; note = 2'-O-methyluridine-3'-phosphorothioate
  modified_base 3: mod_base = OTHER; note = 2'-O-methylcytidine-3'-phosphate
  modified_base 4: mod_base = OTHER; note = 2'-O-methyluridine-3'-phosphate
  modified_base 5: mod_base = OTHER; note = 2'-O-methyladenosine-3'-phosphate
  modified_base 6: mod_base = OTHER; note = 2'-O-methyladenosine-3'-phosphate
  modified_base 7: mod_base = OTHER; note = 2'-deoxy-2'-fluorocytidine-3'-phosphate
  modified_base 8: mod_base = OTHER; note = 2'-O-methylcytidine-3'-phosphate
  modified_base 9: mod_base = OTHER; note = 2'-deoxy-2'-fluorouridine-3'-phosphate
  modified_base 10: mod_base = OTHER; note = 2'-deoxy-2'-fluorocytidine-3'-phosphate
  modified_base 11: mod_base = OTHER; note = 2'-deoxy-2'-fluoroadenosine-3'-phosphate
  modified_base 12: mod_base = OTHER; note = 2'-O-methylcytidine-3'-phosphate
  modified_base 13: mod_base = OTHER; note = 2'-O-methyluridine-3'-phosphate
  modified_base 14: mod_base = OTHER; note = 2'-O-methyluridine-3'-phosphate
  modified_base 15: mod_base = OTHER; note = 2'-O-methylguanosine-3'-phosphate
  modified_base 16: mod_base = OTHER; note = 2'-O-methylcytidine-3'-phosphate
  modified_base 17: mod_base = OTHER; note = 2'-O-methyladenosine-3'-phosphate
  modified_base 18: mod_base = OTHER; note = 2'-O-methyladenosine-3'-phosphate
  modified_base 19: mod_base = OTHER; note = 2'-O-methyluridine-3'-phosphorothioate
  modified_base 20: mod_base = OTHER; note = 2'-O-methyladenosine-3'-phosphorothioate
  modified_base 21: mod_base = OTHER; note = 2'-O-methyladenosine
ttctaacctcacttgcaataa

SEQ ID NO: 985 - RNA, 21 nt, synthetic construct
  source 1..21: mol_type = other RNA
  modified_base 1: mod_base = OTHER; note = 2'-O-methyluridine-3'-phosphorothioate
  modified_base 2: mod_base = OTHER; note = 2'-O-methylcytidine-3'-phosphorothioate
  modified_base 3: mod_base = OTHER; note = 2'-O-methyluridine-3'-phosphate
  modified_base 4: mod_base = OTHER; note = 2'-O-methyladenosine-3'-phosphate
  modified_base 5: mod_base = OTHER; note = 2'-O-methyladenosine-3'-phosphate
  modified_base 6: mod_base = OTHER; note = 2'-O-methylcytidine-3'-phosphate
  modified_base 7: mod_base = OTHER; note = 2'-deoxy-2'-fluorocytidine-3'-phosphate
  modified_base 8: mod_base = OTHER; note = 2'-O-methyluridine-3'-phosphate
  modified_base 9: mod_base = OTHER; note = 2'-deoxy-2'-fluorocytidine-3'-phosphate
  modified_base 10: mod_base = OTHER; note = 2'-deoxy-2'-fluoroadenosine-3'-phosphate
  modified_base 11: mod_base = OTHER; note = 2'-deoxy-2'-fluorocytidine-3'-phosphate
  modified_base 12: mod_base = OTHER; note = 2'-O-methyluridine-3'-phosphate
  modified_base 13: mod_base = OTHER; note = 2'-O-methyluridine-3'-phosphate
  modified_base 14: mod_base = OTHER; note = 2'-O-methylguanosine-3'-phosphate
  modified_base 15: mod_base = OTHER; note = 2'-O-methylcytidine-3'-phosphate
  modified_base 16: mod_base = OTHER; note = 2'-O-methyladenosine-3'-phosphate
  modified_base 17: mod_base = OTHER; note = 2'-O-methyladenosine-3'-phosphate
  modified_base 18: mod_base = OTHER; note = 2'-O-methyluridine-3'-phosphate
  modified_base 19: mod_base = OTHER; note = 2'-O-methyladenosine-3'-phosphorothioate
  modified_base 20: mod_base = OTHER; note = 2'-O-methyladenosine-3'-phosphorothioate
  modified_base 21: mod_base = OTHER; note = 2'-O-methyladenosine
tctaacctcacttgcaataaa

SEQ ID NO: 986 - RNA, 21 nt, synthetic construct
  source 1..21: mol_type = other RNA
  modified_base 1: mod_base = OTHER; note = 2'-O-methyladenosine-3'-phosphorothioate
  modified_base 2: mod_base = OTHER; note = 2'-O-methyladenosine-3'-phosphorothioate
  modified_base 3: mod_base = OTHER; note = 2'-O-methylguanosine-3'-phosphate
  modified_base 4: mod_base = OTHER; note = 2'-O-methyluridine-3'-phosphate
  modified_base 5: mod_base = OTHER; note = 2'-O-methylguanosine-3'-phosphate
  modified_base 6: mod_base = OTHER; note = 2'-O-methylguanosine-3'-phosphate
  modified_base 7: mod_base = OTHER; note = 2'-deoxy-2'-fluoroguanosine-3'-phosphate
  modified_base 8: mod_base = OTHER; note = 2'-O-methyluridine-3'-phosphate
  modified_base 9: mod_base = OTHER; note = 2'-deoxy-2'-fluoroguanosine-3'-phosphate
  modified_base 10: mod_base = OTHER; note = 2'-deoxy-2'-fluoroguanosine-3'-phosphate
  modified_base 11: mod_base = OTHER; note = 2'-deoxy-2'-fluorouridine-3'-phosphate
  modified_base 12: mod_base = OTHER; note = 2'-O-methyladenosine-3'-phosphate
  modified_base 13: mod_base = OTHER; note = 2'-O-methyluridine-3'-phosphate
  modified_base 14: mod_base = OTHER; note = 2'-O-methyladenosine-3'-phosphate
  modified_base 15: mod_base = OTHER; note = 2'-O-methylguanosine-3'-phosphate
  modified_base 16: mod_base = OTHER; note = 2'-O-methyladenosine-3'-phosphate
  modified_base 17: mod_base = OTHER; note = 2'-O-methylguanosine-3'-phosphate
  modified_base 18: mod_base = OTHER; note = 2'-O-methylguanosine-3'-phosphate
  modified_base 19: mod_base = OTHER; note = 2'-O-methylcytidine-3'-phosphorothioate
  modified_base 20: mod_base = OTHER; note = 2'-O-methyluridine-3'-phosphorothioate
  modified_base 21: mod_base = OTHER; note = 2'-O-methyladenosine
aagtgggtggtatagaggcta

SEQ ID NO: 987 - RNA, 21 nt, synthetic construct
  source 1..21: mol_type = other RNA
  modified_base 1: mod_base = OTHER; note = 2'-O-methyluridine-3'-phosphorothioate
  modified_base 2: mod_base = OTHER; note = 2'-O-methylguanosine-3'-phosphorothioate
  modified_base 3: mod_base = OTHER; note = 2'-O-methylguanosine-3'-phosphate
  modified_base 4: mod_base = OTHER; note = 2'-O-methylguanosine-3'-phosphate
  modified_base 5: mod_base = OTHER; note = 2'-O-methyluridine-3'-phosphate
  modified_base 6: mod_base = OTHER; note = 2'-O-methylguanosine-3'-phosphate
  modified_base 7: mod_base = OTHER; note = 2'-deoxy-2'-fluoroguanosine-3'-phosphate
  modified_base 8: mod_base = OTHER; note = 2'-O-methyluridine-3'-phosphate
  modified_base 9: mod_base = OTHER; note = 2'-deoxy-2'-fluoroadenosine-3'-phosphate
  modified_base 10: mod_base = OTHER; note = 2'-deoxy-2'-fluorouridine-3'-phosphate
  modified_base 11: mod_base = OTHER; note = 2'-deoxy-2'-fluoroadenosine-3'-phosphate
  modified_base 12: mod_base = OTHER; note = 2'-O-methylguanosine-3'-phosphate
  modified_base 13: mod_base = OTHER; note = 2'-O-methyladenosine-3'-phosphate
  modified_base 14: mod_base = OTHER; note = 2'-O-methylguanosine-3'-phosphate
  modified_base 15: mod_base = OTHER; note = 2'-O-methylguanosine-3'-phosphate
  modified_base 16: mod_base = OTHER; note = 2'-O-methylcytidine-3'-phosphate
  modified_base 17: mod_base = OTHER; note = 2'-O-methyluridine-3'-phosphate
  modified_base 18: mod_base = OTHER; note = 2'-O-methylcytidine-3'-phosphate
  modified_base 19: mod_base = OTHER; note = 2'-O-methyluridine-3'-phosphorothioate
  modified_base 20: mod_base = OTHER; note = 2'-O-methyluridine-3'-phosphorothioate
  modified_base 21: mod_base = OTHER; note = 2'-O-methyladenosine
tgggtggtatagaggctctta

SEQ ID NO: 988 - RNA, 21 nt, synthetic construct
  source 1..21: mol_type = other RNA
  modified_base 1: mod_base = OTHER; note = 2'-O-methyladenosine-3'-phosphorothioate
  modified_base 2: mod_base = OTHER; note = 2'-O-methylguanosine-3'-phosphorothioate
  modified_base 3: mod_base = OTHER; note = 2'-O-methylcytidine-3'-phosphate
  modified_base 4: mod_base = OTHER; note = 2'-O-methylcytidine-3'-phosphate
  modified_base 5: mod_base = OTHER; note = 2'-O-methyluridine-3'-phosphate
  modified_base 6: mod_base = OTHER; note = 2'-O-methylguanosine-3'-phosphate
  modified_base 7: mod_base = OTHER; note = 2'-deoxy-2'-fluorocytidine-3'-phosphate
  modified_base 8: mod_base = OTHER; note = 2'-O-methylcytidine-3'-phosphate
  modified_base 9: mod_base = OTHER; note = 2'-deoxy-2'-fluoroadenosine-3'-phosphate
  modified_base 10: mod_base = OTHER; note = 2'-deoxy-2'-fluorouridine-3'-phosphate
  modified_base 11: mod_base = OTHER; note = 2'-deoxy-2'-fluorocytidine-3'-phosphate
  modified_base 12: mod_base = OTHER; note = 2'-O-methyluridine-3'-phosphate
  modified_base 13: mod_base = OTHER; note = 2'-O-methylguanosine-3'-phosphate
  modified_base 14: mod_base = OTHER; note = 2'-O-methyluridine-3'-phosphate
  modified_base 15: mod_base = OTHER; note = 2'-O-methylguanosine-3'-phosphate
  modified_base 16: mod_base = OTHER; note = 2'-O-methylcytidine-3'-phosphate
  modified_base 17: mod_base = OTHER; note = 2'-O-methyluridine-3'-phosphate
  modified_base 18: mod_base = OTHER; note = 2'-O-methylcytidine-3'-phosphate
  modified_base 19: mod_base = OTHER; note = 2'-O-methyluridine-3'-phosphorothioate
  modified_base 20: mod_base = OTHER; note = 2'-O-methyluridine-3'-phosphorothioate
  modified_base 21: mod_base = OTHER; note = 2'-O-methyladenosine
agcctgccatctgtgctctta

SEQ ID NO: 989 - RNA, 21 nt, synthetic construct
  source 1..21: mol_type = other RNA
  modified_base 1: mod_base = OTHER; note = 2'-O-methylguanosine-3'-phosphorothioate
  modified_base 2: mod_base = OTHER; note = 2'-O-methylcytidine-3'-phosphorothioate
  modified_base 3: mod_base = OTHER; note = 2'-O-methylcytidine-3'-phosphate
  modified_base 4: mod_base = OTHER; note = 2'-O-methyluridine-3'-phosphate
  modified_base 5: mod_base = OTHER; note = 2'-O-methylguanosine-3'-phosphate
  modified_base 6: mod_base = OTHER; note = 2'-O-methylcytidine-3'-phosphate
  modified_base 7: mod_base = OTHER; note = 2'-deoxy-2'-fluorocytidine-3'-phosphate
  modified_base 8: mod_base = OTHER; note = 2'-O-methyladenosine-3'-phosphate
  modified_base 9: mod_base = OTHER; note = 2'-deoxy-2'-fluorouridine-3'-phosphate
  modified_base 10: mod_base = OTHER; note = 2'-deoxy-2'-fluorocytidine-3'-phosphate
  modified_base 11: mod_base = OTHER; note = 2'-deoxy-2'-fluorouridine-3'-phosphate
  modified_base 12: mod_base = OTHER; note = 2'-O-methylguanosine-3'-phosphate
  modified_base 13: mod_base = OTHER; note = 2'-O-methyluridine-3'-phosphate
  modified_base 14: mod_base = OTHER; note = 2'-O-methylguanosine-3'-phosphate
  modified_base 15: mod_base = OTHER; note = 2'-O-methylcytidine-3'-phosphate
  modified_base 16: mod_base = OTHER; note = 2'-O-methyluridine-3'-phosphate
  modified_base 17: mod_base = OTHER; note = 2'-O-methylcytidine-3'-phosphate
  modified_base 18: mod_base = OTHER; note = 2'-O-methyluridine-3'-phosphate
  modified_base 19: mod_base = OTHER; note = 2'-O-methyluridine-3'-phosphorothioate
  modified_base 20: mod_base = OTHER; note = 2'-O-methylcytidine-3'-phosphorothioate
  modified_base 21: mod_base = OTHER; note = 2'-O-methyladenosine
gcctgccatctgtgctcttca

SEQ ID NO: 990 - RNA, 21 nt, synthetic construct
  source 1..21: mol_type = other RNA
  modified_base 1: mod_base = OTHER; note = 2'-O-methylcytidine-3'-phosphorothioate
  modified_base 2: mod_base = OTHER; note = 2'-O-methyladenosine-3'-phosphorothioate
  modified_base 3: mod_base = OTHER; note = 2'-O-methyluridine-3'-phosphate
  modified_base 4: mod_base = OTHER; note = 2'-O-methylcytidine-3'-phosphate
  modified_base 5: mod_base = OTHER; note = 2'-O-methyluridine-3'-phosphate
  modified_base 6: mod_base = OTHER; note = 2'-O-methylguanosine-3'-phosphate
  modified_base 7: mod_base = OTHER; note = 2'-deoxy-2'-fluorouridine-3'-phosphate
  modified_base 8: mod_base = OTHER; note = 2'-O-methylguanosine-3'-phosphate
  modified_base 9: mod_base = OTHER; note = 2'-deoxy-2'-fluorocytidine-3'-phosphate
  modified_base 10: mod_base = OTHER; note = 2'-deoxy-2'-fluorouridine-3'-phosphate
  modified_base 11: mod_base = OTHER; note = 2'-deoxy-2'-fluorocytidine-3'-phosphate
  modified_base 12: mod_base = OTHER; note = 2'-O-methyluridine-3'-phosphate
  modified_base 13: mod_base = OTHER; note = 2'-O-methyluridine-3'-phosphate
  modified_base 14: mod_base = OTHER; note = 2'-O-methylcytidine-3'-phosphate
  modified_base 15: mod_base = OTHER; note = 2'-O-methylguanosine-3'-phosphate
  modified_base 16: mod_base = OTHER; note = 2'-O-methyluridine-3'-phosphate
  modified_base 17: mod_base = OTHER; note = 2'-O-methylcytidine-3'-phosphate
  modified_base 18: mod_base = OTHER; note = 2'-O-methyladenosine-3'-phosphate
  modified_base 19: mod_base = OTHER; note = 2'-O-methyluridine-3'-phosphorothioate
  modified_base 20: mod_base = OTHER; note = 2'-O-methylcytidine-3'-phosphorothioate
  modified_base 21: mod_base = OTHER; note = 2'-O-methyladenosine
catctgtgctcttcgtcatca

SEQ ID NO: 991 - RNA, 21 nt, synthetic construct
  source 1..21: mol_type = other RNA
  modified_base 1: mod_base = OTHER; note = 2'-O-methylguanosine-3'-phosphorothioate
  modified_base 2: mod_base = OTHER; note = 2'-O-methylcytidine-3'-phosphorothioate
  modified_base 3: mod_base = OTHER; note = 2'-O-methyluridine-3'-phosphate
  modified_base 4: mod_base = OTHER; note = 2'-O-methylcytidine-3'-phosphate
  modified_base 5: mod_base = OTHER; note = 2'-O-methyluridine-3'-phosphate
  modified_base 6: mod_base = OTHER; note = 2'-O-methyluridine-3'-phosphate
  modified_base 7: mod_base = OTHER; note = 2'-deoxy-2'-fluorocytidine-3'-phosphate
  modified_base 8: mod_base = OTHER; note = 2'-O-methylguanosine-3'-phosphate
  modified_base 9: mod_base = OTHER; note = 2'-deoxy-2'-fluorouridine-3'-phosphate
  modified_base 10: mod_base = OTHER; note = 2'-deoxy-2'-fluorocytidine-3'-phosphate
  modified_base 11: mod_base = OTHER; note = 2'-deoxy-2'-fluoroadenosine-3'-phosphate
  modified_base 12: mod_base = OTHER; note = 2'-O-methyluridine-3'-phosphate
  modified_base 13: mod_base = OTHER; note = 2'-O-methylcytidine-3'-phosphate
  modified_base 14: mod_base = OTHER; note = 2'-O-methyluridine-3'-phosphate
  modified_base 15: mod_base = OTHER; note = 2'-O-methylguanosine-3'-phosphate
  modified_base 16: mod_base = OTHER; note = 2'-O-methyladenosine-3'-phosphate
  modified_base 17: mod_base = OTHER; note = 2'-O-methylcytidine-3'-phosphate
  modified_base 18: mod_base = OTHER; note = 2'-O-methylcytidine-3'-phosphate
  modified_base 19: mod_base = OTHER; note = 2'-O-methyladenosine-3'-phosphorothioate
  modified_base 20: mod_base = OTHER; note = 2'-O-methylguanosine-3'-phosphorothioate
  modified_base 21: mod_base = OTHER; note = 2'-O-methyladenosine
gctcttcgtcatctgaccaga

SEQ ID NO: 992 - RNA, 21 nt, synthetic construct
  source 1..21: mol_type = other RNA
  modified_base 1: mod_base = OTHER; note = 2'-O-methyladenosine-3'-phosphorothioate
  modified_base 2: mod_base = OTHER; note = 2'-O-methyluridine-3'-phosphorothioate
  modified_base 3: mod_base = OTHER; note = 2'-O-methylguanosine-3'-phosphate
  modified_base 4: mod_base = OTHER; note = 2'-O-methylcytidine-3'-phosphate
  modified_base 5: mod_base = OTHER; note = 2'-O-methyladenosine-3'-phosphate
  modified_base 6: mod_base = OTHER; note = 2'-O-methylguanosine-3'-phosphate
  modified_base 7: mod_base = OTHER; note = 2'-deoxy-2'-fluorouridine-3'-phosphate
  modified_base 8: mod_base = OTHER; note = 2'-O-methyluridine-3'-phosphate
  modified_base 9: mod_base = OTHER; note = 2'-deoxy-2'-fluorocytidine-3'-phosphate
  modified_base 10: mod_base = OTHER; note = 2'-deoxy-2'-fluoroguanosine-3'-phosphate
  modified_base 11: mod_base = OTHER; note = 2'-deoxy-2'-fluorocytidine-3'-phosphate
  modified_base 12: mod_base = OTHER; note = 2'-O-methylcytidine-3'-phosphate
  modified_base 13: mod_base = OTHER; note = 2'-O-methyluridine-3'-phosphate
  modified_base 14: mod_base = OTHER; note = 2'-O-methyluridine-3'-phosphate
  modified_base 15: mod_base = OTHER; note = 2'-O-methylcytidine-3'-phosphate
  modified_base 16: mod_base = OTHER; note = 2'-O-methyladenosine-3'-phosphate
  modified_base 17: mod_base = OTHER; note = 2'-O-methylcytidine-3'-phosphate
  modified_base 18: mod_base = OTHER; note = 2'-O-methyluridine-3'-phosphate
  modified_base 19: mod_base = OTHER; note = 2'-O-methyladenosine-3'-phosphorothioate
  modified_base 20: mod_base = OTHER; note = 2'-O-methyluridine-3'-phosphorothioate
  modified_base 21: mod_base = OTHER; note = 2'-O-methyladenosine
atgcagttcgccttcactata

SEQ ID NO: 993 - RNA, 21 nt, synthetic construct
  source 1..21: mol_type = other RNA
  modified_base 1: mod_base = OTHER; note = 2'-O-methyluridine-3'-phosphorothioate
  modified_base 2: mod_base = OTHER; note = 2'-O-methylguanosine-3'-phosphorothioate
  modified_base 3: mod_base = OTHER; note = 2'-O-methylguanosine-3'-phosphate
  modified_base 4: mod_base = OTHER; note = 2'-O-methyluridine-3'-phosphate
  modified_base 5: mod_base = OTHER; note = 2'-O-methyluridine-3'-phosphate
  modified_base 6: mod_base = OTHER; note = 2'-O-methyladenosine-3'-phosphate
  modified_base 7: mod_base = OTHER; note = 2'-deoxy-2'-fluoroadenosine-3'-phosphate
  modified_base 8: mod_base = OTHER; note = 2'-O-methylguanosine-3'-phosphate
  modified_base 9: mod_base = OTHER; note = 2'-deoxy-2'-fluorocytidine-3'-phosphate
  modified_base 10: mod_base = OTHER; note = 2'-deoxy-2'-fluorouridine-3'-phosphate
  modified_base 11: mod_base = OTHER; note = 2'-deoxy-2'-fluorocytidine-3'-phosphate
  modified_base 12: mod_base = OTHER; note = 2'-O-methyluridine-3'-phosphate
  modified_base 13: mod_base = OTHER; note = 2'-O-methyluridine-3'-phosphate
  modified_base 14: mod_base = OTHER; note = 2'-O-methyladenosine-3'-phosphate
  modified_base 15: mod_base = OTHER; note = 2'-O-methylcytidine-3'-phosphate
  modified_base 16: mod_base = OTHER; note = 2'-O-methyladenosine-3'-phosphate
  modified_base 17: mod_base = OTHER; note = 2'-O-methylcytidine-3'-phosphate
  modified_base 18: mod_base = OTHER; note = 2'-O-methylcytidine-3'-phosphate
  modified_base 19: mod_base = OTHER; note = 2'-O-methylcytidine-3'-phosphorothioate
  modified_base 20: mod_base = OTHER; note = 2'-O-methyladenosine-3'-phosphorothioate
  modified_base 21: mod_base = OTHER; note = 2'-O-methyladenosine
tggttaagctcttacacccaa

SEQ ID NO: 994 - RNA, 21 nt, synthetic construct
  source 1..21: mol_type = other RNA
  modified_base 1: mod_base = OTHER; note = 2'-O-methylcytidine-3'-phosphorothioate
  modified_base 2: mod_base = OTHER; note = 2'-O-methyluridine-3'-phosphorothioate
  modified_base 3: mod_base = OTHER; note = 2'-O-methylguanosine-3'-phosphate
  modified_base 4: mod_base = OTHER; note = 2'-O-methyluridine-3'-phosphate
  modified_base 5: mod_base = OTHER; note = 2'-O-methyluridine-3'-phosphate
  modified_base 6: mod_base = OTHER; note = 2'-O-methylguanosine-3'-phosphate
  modified_base 7: mod_base = OTHER; note = 2'-deoxy-2'-fluoroguanosine-3'-phosphate
  modified_base 8: mod_base = OTHER; note = 2'-O-methyladenosine-3'-phosphate
  modified_base 9: mod_base = OTHER; note = 2'-deoxy-2'-fluorouridine-3'-phosphate
  modified_base 10: mod_base = OTHER; note = 2'-deoxy-2'-fluorouridine-3'-phosphate
  modified_base 11: mod_base = OTHER; note = 2'-deoxy-2'-fluoroguanosine-3'-phosphate
  modified_base 12: mod_base = OTHER; note = 2'-O-methyladenosine-3'-phosphate
  modified_base 13: mod_base = OTHER; note = 2'-O-methyluridine-3'-phosphate
  modified_base 14: mod_base = OTHER; note = 2'-O-methyluridine-3'-phosphate
  modified_base 15: mod_base = OTHER; note = 2'-O-methylcytidine-3'-phosphate
  modified_base 16: mod_base = OTHER; note = 2'-O-methylguanosine-3'-phosphate
  modified_base 17: mod_base = OTHER; note = 2'-O-methyladenosine-3'-phosphate
  modified_base 18: mod_base = OTHER; note = 2'-O-methyladenosine-3'-phosphate
  modified_base 19: mod_base = OTHER; note = 2'-O-methyladenosine-3'-phosphorothioate
  modified_base 20: mod_base = OTHER; note = 2'-O-methyluridine-3'-phosphorothioate
  modified_base 21: mod_base = OTHER; note = 2'-O-methyladenosine
ctgttggattgattcgaaata

SEQ ID NO: 995 - RNA, 21 nt, synthetic construct
  source 1..21: mol_type = other RNA
  modified_base 1: mod_base = OTHER; note = 2'-O-methyluridine-3'-phosphorothioate
  modified_base 2: mod_base = OTHER; note = 2'-O-methylguanosine-3'-phosphorothioate
  modified_base 3: mod_base = OTHER; note = 2'-O-methyluridine-3'-phosphate
  modified_base 4: mod_base = OTHER; note = 2'-O-methyluridine-3'-phosphate
  modified_base 5: mod_base = OTHER; note = 2'-O-methylguanosine-3'-phosphate
  modified_base 6: mod_base = OTHER; note = 2'-O-methylguanosine-3'-phosphate
  modified_base 7: mod_base = OTHER; note = 2'-deoxy-2'-fluoroadenosine-3'-phosphate
  modified_base 8: mod_base = OTHER; note = 2'-O-methyluridine-3'-phosphate
  modified_base 9: mod_base = OTHER; note = 2'-deoxy-2'-fluorouridine-3'-phosphate
  modified_base 10: mod_base = OTHER; note = 2'-deoxy-2'-fluoroguanosine-3'-phosphate
  modified_base 11: mod_base = OTHER; note = 2'-deoxy-2'-fluoroadenosine-3'-phosphate
  modified_base 12: mod_base = OTHER; note = 2'-O-methyluridine-3'-phosphate
  modified_base 13: mod_base = OTHER; note = 2'-O-methyluridine-3'-phosphate
  modified_base 14: mod_base = OTHER; note = 2'-O-methylcytidine-3'-phosphate
  modified_base 15: mod_base = OTHER; note = 2'-O-methylguanosine-3'-phosphate
  modified_base 16: mod_base = OTHER; note = 2'-O-methyladenosine-3'-phosphate
  modified_base 17: mod_base = OTHER; note = 2'-O-methyladenosine-3'-phosphate
  modified_base 18: mod_base = OTHER; note = 2'-O-methyladenosine-3'-phosphate
  modified_base 19: mod_base = OTHER; note = 2'-O-methyluridine-3'-phosphorothioate
  modified_base 20: mod_base = OTHER; note = 2'-O-methylcytidine-3'-phosphorothioate
  modified_base 21: mod_base = OTHER; note = 2'-O-methyladenosine
tgttggattgattcgaaatca

SEQ ID NO: 996 - RNA, 21 nt, synthetic construct
  source 1..21: mol_type = other RNA
  modified_base 1: mod_base = OTHER; note = 2'-O-methylcytidine-3'-phosphorothioate
  modified_base 2: mod_base = OTHER; note = 2'-O-methylguanosine-3'-phosphorothioate
  modified_base 3: mod_base = OTHER; note = 2'-O-methyluridine-3'-phosphate
  modified_base 4: mod_base = OTHER; note = 2'-O-methylguanosine-3'-phosphate
  modified_base 5: mod_base = OTHER; note = 2'-O-methyladenosine-3'-phosphate
  modified_base 6: mod_base = OTHER; note = 2'-O-methylguanosine-3'-phosphate
  modified_base 7: mod_base = OTHER; note = 2'-deoxy-2'-fluorocytidine-3'-phosphate
  modified_base 8: mod_base = OTHER; note = 2'-O-methyladenosine-3'-phosphate
  modified_base 9: mod_base = OTHER; note = 2'-deoxy-2'-fluoroguanosine-3'-phosphate
  modified_base 10: mod_base = OTHER; note = 2'-deoxy-2'-fluoroguanosine-3'-phosphate
  modified_base 11: mod_base = OTHER; note = 2'-deoxy-2'-fluoroguanosine-3'-phosphate
  modified_base 12: mod_base = OTHER; note = 2'-O-methyluridine-3'-phosphate
  modified_base 13: mod_base = OTHER; note = 2'-O-methylguanosine-3'-phosphate
  modified_base 14: mod_base = OTHER; note = 2'-O-methylcytidine-3'-phosphate
  modified_base 15: mod_base = OTHER; note = 2'-O-methylcytidine-3'-phosphate
  modified_base 16: mod_base = OTHER; note = 2'-O-methyladenosine-3'-phosphate
  modified_base 17: mod_base = OTHER; note = 2'-O-methyluridine-3'-phosphate
  modified_base 18: mod_base = OTHER; note = 2'-O-methyluridine-3'-phosphate
  modified_base 19: mod_base = OTHER; note = 2'-O-methylcytidine-3'-phosphorothioate
  modified_base 20: mod_base = OTHER; note = 2'-O-methylcytidine-3'-phosphorothioate
  modified_base 21: mod_base = OTHER; note = 2'-O-methyladenosine
cgtgagcagggtgccattcca

SEQ ID NO: 997 - RNA, 21 nt, synthetic construct
  source 1..21: mol_type = other RNA
  modified_base 1: mod_base = OTHER; note = 2'-O-methylcytidine-3'-phosphorothioate
  modified_base 2: mod_base = OTHER; note = 2'-O-methylcytidine-3'-phosphorothioate
  modified_base 3: mod_base = OTHER; note = 2'-O-methyladenosine-3'-phosphate
  modified_base 4: mod_base = OTHER; note = 2'-O-methylcytidine-3'-phosphate
  modified_base 5: mod_base = OTHER; note = 2'-O-methylguanosine-3'-phosphate
  modified_base 6: mod_base = OTHER; note = 2'-O-methyladenosine-3'-phosphate
  modified_base 7: mod_base = OTHER; note = 2'-deoxy-2'-fluorocytidine-3'-phosphate
  modified_base 8: mod_base = OTHER; note = 2'-O-methyluridine-3'-phosphate
  modified_base 9: mod_base = OTHER; note = 2'-deoxy-2'-fluoroadenosine-3'-phosphate
  modified_base 10: mod_base = OTHER; note = 2'-deoxy-2'-fluoroguanosine-3'-phosphate
  modified_base 11: mod_base = OTHER; note = 2'-deoxy-2'-fluorouridine-3'-phosphate
  modified_base 12: mod_base = OTHER; note = 2'-O-methyluridine-3'-phosphate
  modified_base 13: mod_base = OTHER; note = 2'-O-methylcytidine-3'-phosphate
  modified_base 14: mod_base = OTHER; note = 2'-O-methyladenosine-3'-phosphate
  modified_base 15: mod_base = OTHER; note = 2'-O-methylguanosine-3'-phosphate
  modified_base 16: mod_base = OTHER; note = 2'-O-methyluridine-3'-phosphate
  modified_base 17: mod_base = OTHER; note = 2'-O-methyluridine-3'-phosphate
  modified_base 18: mod_base = OTHER; note = 2'-O-methylguanosine-3'-phosphate
  modified_base 19: mod_base = OTHER; note = 2'-O-methylcytidine-3'-phosphorothioate
  modified_base 20: mod_base = OTHER; note = 2'-O-methyluridine-3'-phosphorothioate
  modified_base 21: mod_base = OTHER; note = 2'-O-methyladenosine
ccacgactagttcagttgcta

SEQ ID NO: 998 - RNA, 21 nt, synthetic construct
  source 1..21: mol_type = other RNA
  modified_base 1: mod_base = OTHER; note = 2'-O-methyluridine-3'-phosphorothioate
  modified_base 2: mod_base = OTHER; note = 2'-O-methyluridine-3'-phosphorothioate
  modified_base 3: mod_base = OTHER; note = 2'-O-methylcytidine-3'-phosphate
  modified_base 4: mod_base = OTHER; note = 2'-O-methyladenosine-3'-phosphate
  modified_base 5: mod_base = OTHER; note = 2'-O-methylguanosine-3'-phosphate
  modified_base 6: mod_base = OTHER; note = 2'-O-methyluridine-3'-phosphate
  modified_base 7: mod_base = OTHER; note = 2'-deoxy-2'-fluorouridine-3'-phosphate
  modified_base 8: mod_base = OTHER; note = 2'-O-methylguanosine-3'-phosphate
  modified_base 9: mod_base = OTHER; note = 2'-deoxy-2'-fluorocytidine-3'-phosphate
  modified_base 10: mod_base = OTHER; note = 2'-deoxy-2'-fluorouridine-3'-phosphate
  modified_base 11: mod_base = OTHER; note = 2'-deoxy-2'-fluorouridine-3'-phosphate
  modified_base 12: mod_base = OTHER; note = 2'-O-methylguanosine-3'-phosphate
  modified_base 13: mod_base = OTHER; note = 2'-O-methyluridine-3'-phosphate
  modified_base 14: mod_base = OTHER; note = 2'-O-methyluridine-3'-phosphate
  modified_base 15: mod_base = OTHER; note = 2'-O-methylcytidine-3'-phosphate
  modified_base 16: mod_base = OTHER; note = 2'-O-methylguanosine-3'-phosphate
  modified_base 17: mod_base = OTHER; note = 2'-O-methyluridine-3'-phosphate
  modified_base 18: mod_base = OTHER; note = 2'-O-methylguanosine-3'-phosphate
  modified_base 19: mod_base = OTHER; note = 2'-O-methylcytidine-3'-phosphorothioate
  modified_base 20: mod_base = OTHER; note = 2'-O-methyladenosine-3'-phosphorothioate
  modified_base 21: mod_base = OTHER; note = 2'-O-methyladenosine
ttcagttgcttgttcgtgcaa

SEQ ID NO: 999 - RNA, 21 nt, synthetic construct
  source 1..21: mol_type = other RNA
  modified_base 1: mod_base = OTHER; note = 2'-O-methyluridine-3'-phosphorothioate
  modified_base 2: mod_base = OTHER; note = 2'-O-methylcytidine-3'-phosphorothioate
  modified_base 3: mod_base = OTHER; note = 2'-O-methyladenosine-3'-phosphate
  modified_base 4: mod_base = OTHER; note = 2'-O-methylguanosine-3'-phosphate
  modified_base 5: mod_base = OTHER; note = 2'-O-methyluridine-3'-phosphate
  modified_base 6: mod_base = OTHER; note = 2'-O-methyluridine-3'-phosphate
  modified_base 7: mod_base = OTHER; note = 2'-deoxy-2'-fluoroguanosine-3'-phosphate
  modified_base 8: mod_base = OTHER; note = 2'-O-methylcytidine-3'-phosphate
  modified_base 9: mod_base = OTHER; note = 2'-deoxy-2'-fluorouridine-3'-phosphate
  modified_base 10: mod_base = OTHER; note = 2'-deoxy-2'-fluorouridine-3'-phosphate
  modified_base 11: mod_base = OTHER; note = 2'-deoxy-2'-fluoroguanosine-3'-phosphate
  modified_base 12: mod_base = OTHER; note = 2'-O-methyluridine-3'-phosphate
  modified_base 13: mod_base = OTHER; note = 2'-O-methyluridine-3'-phosphate
  modified_base 14: mod_base = OTHER; note = 2'-O-methylcytidine-3'-phosphate
  modified_base 15: mod_base = OTHER; note = 2'-O-methylguanosine-3'-phosphate
  modified_base 16: mod_base = OTHER; note = 2'-O-methyluridine-3'-phosphate
  modified_base 17: mod_base = OTHER; note = 2'-O-methylguanosine-3'-phosphate
  modified_base 18: mod_base = OTHER; note = 2'-O-methylcytidine-3'-phosphate
  modified_base 19: mod_base = OTHER; note = 2'-O-methyladenosine-3'-phosphorothioate
  modified_base 20: mod_base = OTHER; note = 2'-O-methylcytidine-3'-phosphorothioate
  modified_base 21: mod_base = OTHER; note = 2'-O-methyladenosine
tcagttgcttgttcgtgcaca

SEQ ID NO: 1000 - RNA, 21 nt, synthetic construct
  source 1..21: mol_type = other RNA
  modified_base 1: mod_base = OTHER; note = 2'-O-methyladenosine-3'-phosphorothioate
  modified_base 2: mod_base = OTHER; note = 2'-O-methylguanosine-3'-phosphorothioate
  modified_base 3: mod_base = OTHER; note = 2'-O-methyluridine-3'-phosphate
  modified_base 4: mod_base = OTHER; note = 2'-O-methyluridine-3'-phosphate
  modified_base 5: mod_base = OTHER; note = 2'-O-methylguanosine-3'-phosphate
  modified_base 6: mod_base = OTHER; note = 2'-O-methylcytidine-3'-phosphate
  modified_base 7: mod_base = OTHER; note = 2'-deoxy-2'-fluorouridine-3'-phosphate
  modified_base 8: mod_base = OTHER; note = 2'-O-methyluridine-3'-phosphate
  modified_base 9: mod_base = OTHER; note = 2'-deoxy-2'-fluoroguanosine-3'-phosphate
  modified_base 10: mod_base = OTHER; note = 2'-deoxy-2'-fluorouridine-3'-phosphate
  modified_base 11: mod_base = OTHER; note = 2'-deoxy-2'-fluorouridine-3'-phosphate
  modified_base 12: mod_base = OTHER; note = 2'-O-methylcytidine-3'-phosphate
  modified_base 13: mod_base = OTHER; note = 2'-O-methylguanosine-3'-phosphate
  modified_base 14: mod_base = OTHER; note = 2'-O-methyluridine-3'-phosphate
  modified_base 15: mod_base = OTHER; note = 2'-O-methylguanosine-3'-phosphate
  modified_base 16: mod_base = OTHER; note = 2'-O-methylcytidine-3'-phosphate
  modified_base 17: mod_base = OTHER; note = 2'-O-methyladenosine-3'-phosphate
  modified_base 18: mod_base = OTHER; note = 2'-O-methylcytidine-3'-phosphate
  modified_base 19: mod_base = OTHER; note = 2'-O-methyladenosine-3'-phosphorothioate
  modified_base 20: mod_base = OTHER; note = 2'-O-methyluridine-3'-phosphorothioate
  modified_base 21: mod_base = OTHER; note = 2'-O-methyladenosine
agttgcttgttcgtgcacata

SEQ ID NO: 1001 - RNA, 21 nt, synthetic construct
  source 1..21: mol_type = other RNA
  modified_base 1: mod_base = OTHER; note = 2'-O-methylcytidine-3'-phosphorothioate
  modified_base 2: mod_base = OTHER; note = 2'-O-methyladenosine-3'-phosphorothioate
  modified_base 3: mod_base = OTHER; note = 2'-O-methylguanosine-3'-phosphate
  modified_base 4: mod_base = OTHER; note = 2'-O-methyladenosine-3'-phosphate
  modified_base 5: mod_base = OTHER; note = 2'-O-methylguanosine-3'-phosphate
  modified_base 6: mod_base = OTHER; note = 2'-O-methylguanosine-3'-phosphate
  modified_base 7: mod_base = OTHER; note = 2'-deoxy-2'-fluoroadenosine-3'-phosphate
  modified_base 8: mod_base = OTHER; note = 2'-O-methylcytidine-3'-phosphate
  modified_base 9: mod_base = OTHER; note = 2'-deoxy-2'-fluorouridine-3'-phosphate
  modified_base 10: mod_base = OTHER; note = 2'-deoxy-2'-fluoroadenosine-3'-phosphate
  modified_base 11: mod_base = OTHER; note = 2'-deoxy-2'-fluoroadenosine-3'-phosphate
  modified_base 12: mod_base = OTHER; note = 2'-O-methyladenosine-3'-phosphate
  modified_base 13: mod_base = OTHER; note = 2'-O-methyluridine-3'-phosphate
  modified_base 14: mod_base = OTHER; note = 2'-O-methyladenosine-3'-phosphate
  modified_base 15: mod_base = OTHER; note = 2'-O-methylcytidine-3'-phosphate
  modified_base 16: mod_base = OTHER; note = 2'-O-methylcytidine-3'-phosphate
  modified_base 17: mod_base = OTHER; note = 2'-O-methyladenosine-3'-phosphate
  modified_base 18: mod_base = OTHER; note = 2'-O-methyluridine-3'-phosphate
  modified_base 19: mod_base = OTHER; note = 2'-O-methyluridine-3'-phosphorothioate
  modified_base 20: mod_base = OTHER; note = 2'-O-methylcytidine-3'-phosphorothioate
  modified_base 21: mod_base = OTHER; note = 2'-O-methyladenosine
cagaggactaaataccattca

SEQ ID NO: 1002 - RNA, 21 nt, synthetic construct
  source 1..21: mol_type = other RNA
  modified_base 1: mod_base = OTHER; note = 2'-O-methylguanosine-3'-phosphorothioate
  modified_base 2: mod_base = OTHER; note = 2'-O-methyladenosine-3'-phosphorothioate
  modified_base 3: mod_base = OTHER; note = 2'-O-methylcytidine-3'-phosphate
  modified_base 4: mod_base = OTHER; note = 2'-O-methyluridine-3'-phosphate
  modified_base 5: mod_base = OTHER; note = 2'-O-methyladenosine-3'-phosphate
  modified_base 6: mod_base = OTHER; note = 2'-O-methyladenosine-3'-phosphate
  modified_base 7: mod_base = OTHER; note = 2'-deoxy-2'-fluoroadenosine-3'-phosphate
  modified_base 8: mod_base = OTHER; note = 2'-O-methyluridine-3'-phosphate
  modified_base 9: mod_base = OTHER; note = 2'-deoxy-2'-fluoroadenosine-3'-phosphate
  modified_base 10: mod_base = OTHER; note = 2'-deoxy-2'-fluorocytidine-3'-phosphate
  modified_base 11: mod_base = OTHER; note = 2'-deoxy-2'-fluorocytidine-3'-phosphate
  modified_base 12: mod_base = OTHER; note = 2'-O-methyladenosine-3'-phosphate
  modified_base 13: mod_base = OTHER; note = 2'-O-methyluridine-3'-phosphate
  modified_base 14: mod_base = OTHER; note = 2'-O-methyluridine-3'-phosphate
  modified_base 15: mod_base = OTHER; note = 2'-O-methylcytidine-3'-phosphate
  modified_base 16: mod_base = OTHER; note = 2'-O-methylcytidine-3'-phosphate
  modified_base 17: mod_base = OTHER; note = 2'-O-methyladenosine-3'-phosphate
  modified_base 18: mod_base = OTHER; note = 2'-O-methyluridine-3'-phosphate
  modified_base 19: mod_base = OTHER; note = 2'-O-methyluridine-3'-phosphorothioate
  modified_base 20: mod_base = OTHER; note = 2'-O-methylguanosine-3'-phosphorothioate
  modified_base 21: mod_base = OTHER; note = 2'-O-methyladenosine
gactaaataccattccattga

SEQ ID NO: 1003 - RNA, 21 nt, synthetic construct
  source 1..21: mol_type = other RNA
  modified_base 1: mod_base = OTHER; note = 2'-O-methylcytidine-3'-phosphorothioate
  modified_base 2: mod_base = OTHER; note = 2'-O-methylcytidine-3'-phosphorothioate
  modified_base 3: mod_base = OTHER; note = 2'-O-methyladenosine-3'-phosphate
  modified_base 4: mod_base = OTHER; note = 2'-O-methyluridine-3'-phosphate
  modified_base 5: mod_base = OTHER; note = 2'-O-methyluridine-3'-phosphate
  modified_base 6: mod_base = OTHER; note = 2'-O-methylcytidine-3'-phosphate
  modified_base 7: mod_base = OTHER; note = 2'-deoxy-2'-fluorocytidine-3'-phosphate
  modified_base 8: mod_base = OTHER; note = 2'-O-methyladenosine-3'-phosphate
  modified_base 9: mod_base = OTHER; note = 2'-deoxy-2'-fluorouridine-3'-phosphate
  modified_base 10: mod_base = OTHER; note = 2'-deoxy-2'-fluorouridine-3'-phosphate
  modified_base 11: mod_base = OTHER; note = 2'-deoxy-2'-fluoroguanosine-3'-phosphate
  modified_base 12: mod_base = OTHER; note = 2'-O-methyluridine-3'-phosphate
  modified_base 13: mod_base = OTHER; note = 2'-O-methyluridine-3'-phosphate
  modified_base 14: mod_base = OTHER; note = 2'-O-methyluridine-3'-phosphate
  modified_base 15: mod_base = OTHER; note = 2'-O-methylguanosine-3'-phosphate
  modified_base 16: mod_base = OTHER; note = 2'-O-methyluridine-3'-phosphate
  modified_base 17: mod_base = OTHER; note = 2'-O-methylguanosine-3'-phosphate
  modified_base 18: mod_base = OTHER; note = 2'-O-methylcytidine-3'-phosphate
  modified_base 19: mod_base = OTHER; note = 2'-O-methyladenosine-3'-phosphorothioate
  modified_base 20: mod_base = OTHER; note = 2'-O-methylguanosine-3'-phosphorothioate
  modified_base 21: mod_base = OTHER; note = 2'-O-methyladenosine
ccattccattgtttgtgcaga

SEQ ID NO: 1004 - RNA, 21 nt, synthetic construct
  source 1..21: mol_type = other RNA
  modified_base 1: mod_base = OTHER; note = 2'-O-methyladenosine-3'-phosphorothioate
  modified_base 2: mod_base = OTHER; note = 2'-O-methyluridine-3'-phosphorothioate
  modified_base 3: mod_base = OTHER; note = 2'-O-methyluridine-3'-phosphate
  modified_base 4: mod_base = OTHER; note = 2'-O-methylcytidine-3'-phosphate
  modified_base 5: mod_base = OTHER; note = 2'-O-methylcytidine-3'-phosphate
  modified_base 6: mod_base = OTHER; note = 2'-O-methyladenosine-3'-phosphate
  modified_base 7: mod_base = OTHER; note = 2'-deoxy-2'-fluorouridine-3'-phosphate
  modified_base 8: mod_base = OTHER; note = 2'-O-methyluridine-3'-phosphate
  modified_base 9: mod_base = OTHER; note = 2'-deoxy-2'-fluoroguanosine-3'-phosphate
  modified_base 10: mod_base = OTHER; note = 2'-deoxy-2'-fluorouridine-3'-phosphate
  modified_base 11: mod_base = OTHER; note = 2'-deoxy-2'-fluorouridine-3'-phosphate
  modified_base 12: mod_base = OTHER; note = 2'-O-methyluridine-3'-phosphate
  modified_base 13: mod_base = OTHER; note = 2'-O-methylguanosine-3'-phosphate
  modified_base 14: mod_base = OTHER; note = 2'-O-methyluridine-3'-phosphate
  modified_base 15: mod_base = OTHER; note = 2'-O-methylguanosine-3'-phosphate
  modified_base 16: mod_base = OTHER; note = 2'-O-methylcytidine-3'-phosphate
  modified_base 17: mod_base = OTHER; note = 2'-O-methyladenosine-3'-phosphate
  modified_base 18: mod_base = OTHER; note = 2'-O-methylguanosine-3'-phosphate
  modified_base 19: mod_base = OTHER; note = 2'-O-methylcytidine-3'-phosphorothioate
  modified_base 20: mod_base = OTHER; note = 2'-O-methyluridine-3'-phosphorothioate
  modified_base 21: mod_base = OTHER; note = 2'-O-methyladenosine
attccattgtttgtgcagcta

SEQ ID NO: 1005 - RNA, 21 nt, synthetic construct
  source 1..21: mol_type = other RNA
  modified_base 1: mod_base = OTHER; note = 2'-O-methyluridine-3'-phosphorothioate
  modified_base 2: mod_base = OTHER; note = 2'-O-methyluridine-3'-phosphorothioate
  modified_base 3: mod_base = OTHER; note = 2'-O-methylcytidine-3'-phosphate
  modified_base 4: mod_base = OTHER; note = 2'-O-methylcytidine-3'-phosphate
  modified_base 5: mod_base = OTHER; note = 2'-O-methyladenosine-3'-phosphate
  modified_base 6: mod_base = OTHER; note = 2'-O-methyluridine-3'-phosphate
  modified_base 7: mod_base = OTHER; note = 2'-deoxy-2'-fluorouridine-3'-phosphate
  modified_base 8: mod_base = OTHER; note = 2'-O-methylguanosine-3'-phosphate
  modified_base 9: mod_base = OTHER; note = 2'-deoxy-2'-fluorouridine-3'-phosphate
  modified_base 10: mod_base = OTHER; note = 2'-deoxy-2'-fluorouridine-3'-phosphate
  modified_base 11: mod_base = OTHER; note = 2'-deoxy-2'-fluorouridine-3'-phosphate
  modified_base 12: mod_base = OTHER; note = 2'-O-methylguanosine-3'-phosphate
  modified_base 13: mod_base = OTHER; note = 2'-O-methyluridine-3'-phosphate
  modified_base 14: mod_base = OTHER; note = 2'-O-methylguanosine-3'-phosphate
  modified_base 15: mod_base = OTHER; note = 2'-O-methylcytidine-3'-phosphate
  modified_base 16: mod_base = OTHER; note = 2'-O-methyladenosine-3'-phosphate
  modified_base 17: mod_base = OTHER; note = 2'-O-methylguanosine-3'-phosphate
  modified_base 18: mod_base = OTHER; note = 2'-O-methylcytidine-3'-phosphate
  modified_base 19: mod_base = OTHER; note = 2'-O-methyluridine-3'-phosphorothioate
  modified_base 20: mod_base = OTHER; note = 2'-O-methylguanosine-3'-phosphorothioate
  modified_base 21: mod_base = OTHER; note = 2'-O-methyladenosine
ttccattgtttgtgcagctga

SEQ ID NO: 1006 - RNA, 21 nt, synthetic construct
  source 1..21: mol_type = other RNA
  modified_base 1: mod_base = OTHER; note = 2'-O-methylcytidine-3'-phosphorothioate
  modified_base 2: mod_base = OTHER; note = 2'-O-methylcytidine-3'-phosphorothioate
  modified_base 3: mod_base = OTHER; note = 2'-O-methyladenosine-3'-phosphate
  modified_base 4: mod_base = OTHER; note = 2'-O-methyluridine-3'-phosphate
  modified_base 5: mod_base = OTHER; note = 2'-O-methyluridine-3'-phosphate
  modified_base 6: mod_base = OTHER; note = 2'-O-methylguanosine-3'-phosphate
  modified_base 7: mod_base = OTHER; note = 2'-deoxy-2'-fluorouridine-3'-phosphate
  modified_base 8: mod_base = OTHER; note = 2'-O-methyluridine-3'-phosphate
  modified_base 9: mod_base = OTHER; note = 2'-deoxy-2'-fluorouridine-3'-phosphate
  modified_base 10: mod_base = OTHER; note = 2'-deoxy-2'-fluoroguanosine-3'-phosphate
  modified_base 11: mod_base = OTHER; note = 2'-deoxy-2'-fluorouridine-3'-phosphate
  modified_base 12: mod_base = OTHER; note = 2'-O-methylguanosine-3'-phosphate
  modified_base 13: mod_base = OTHER; note = 2'-O-methylcytidine-3'-phosphate
  modified_base 14: mod_base = OTHER; note = 2'-O-methyladenosine-3'-phosphate
  modified_base 15: mod_base = OTHER; note = 2'-O-methylguanosine-3'-phosphate
  modified_base 16: mod_base = OTHER; note = 2'-O-methylcytidine-3'-phosphate
  modified_base 17: mod_base = OTHER; note = 2'-O-methyluridine-3'-phosphate
  modified_base 18: mod_base = OTHER; note = 2'-O-methylguanosine-3'-phosphate
  modified_base 19: mod_base = OTHER; note = 2'-O-methylcytidine-3'-phosphorothioate
  modified_base 20: mod_base = OTHER; note = 2'-O-methyluridine-3'-phosphorothioate
  modified_base 21: mod_base = OTHER; note = 2'-O-methyladenosine
ccattgtttgtgcagctgcta

SEQ ID NO: 1007 - RNA, 21 nt, synthetic construct
  source 1..21: mol_type = other RNA
  modified_base 1: mod_base = OTHER; note = 2'-O-methylguanosine-3'-phosphorothioate
  modified_base 2: mod_base = OTHER; note = 2'-O-methylcytidine-3'-phosphorothioate
  modified_base 3: mod_base = OTHER; note = 2'-O-methylcytidine-3'-phosphate
  modified_base 4: mod_base = OTHER; note = 2'-O-methyladenosine-3'-phosphate
  modified_base 5: mod_base = OTHER; note = 2'-O-methylcytidine-3'-phosphate
  modified_base 6: mod_base = OTHER; note = 2'-O-methyladenosine-3'-phosphate
  modified_base 7: mod_base = OTHER; note = 2'-deoxy-2'-fluoroguanosine-3'-phosphate
  modified_base 8: mod_base = OTHER; note = 2'-O-methylcytidine-3'-phosphate
  modified_base 9: mod_base = OTHER; note = 2'-deoxy-2'-fluorouridine-3'-phosphate
  modified_base 10: mod_base = OTHER; note = 2'-deoxy-2'-fluorocytidine-3'-phosphate
  modified_base 11: mod_base = OTHER; note = 2'-deoxy-2'-fluorocytidine-3'-phosphate
  modified_base 12: mod_base = OTHER; note = 2'-O-methyluridine-3'-phosphate
  modified_base 13: mod_base = OTHER; note = 2'-O-methylcytidine-3'-phosphate
  modified_base 14: mod_base = OTHER; note = 2'-O-methyluridine-3'-phosphate
  modified_base 15: mod_base = OTHER; note = 2'-O-methylguanosine-3'-phosphate
  modified_base 16: mod_base = OTHER; note = 2'-O-methyladenosine-3'-phosphate
  modified_base 17: mod_base = OTHER; note = 2'-O-methylcytidine-3'-phosphate
  modified_base 18: mod_base = OTHER; note = 2'-O-methyladenosine-3'-phosphate
  modified_base 19: mod_base = OTHER; note = 2'-O-methylguanosine-3'-phosphorothioate
  modified_base 20: mod_base = OTHER; note = 2'-O-methyladenosine-3'-phosphorothioate
  modified_base 21: mod_base = OTHER; note = 2'-O-methyladenosine
gccacagctcctctgacagaa

SEQ ID NO: 1008 - RNA, 21 nt, synthetic construct
  source 1..21: mol_type = other RNA
  modified_base 1: mod_base = OTHER; note = 2'-O-methyladenosine-3'-phosphorothioate
  modified_base 2: mod_base = OTHER; note = 2'-O-methyladenosine-3'-phosphorothioate
  modified_base 3: mod_base = OTHER; note = 2'-O-methylguanosine-3'-phosphate
  modified_base 4: mod_base = OTHER; note = 2'-O-methylcytidine-3'-phosphate
  modified_base 5: mod_base = OTHER; note = 2'-O-methylcytidine-3'-phosphate
  modified_base 6: mod_base = OTHER; note = 2'-O-methyladenosine-3'-phosphate
  modified_base 7: mod_base = OTHER; note = 2'-deoxy-2'-fluorocytidine-3'-phosphate
  modified_base 8: mod_base = OTHER; note = 2'-O-methyladenosine-3'-phosphate
  modified_base 9: mod_base = OTHER; note = 2'-deoxy-2'-fluoroadenosine-3'-phosphate
  modified_base 10: mod_base = OTHER; note = 2'-deoxy-2'-fluoroguanosine-3'-phosphate
  modified_base 11: mod_base = OTHER; note = 2'-deoxy-2'-fluoroadenosine-3'-phosphate
  modified_base 12: mod_base = OTHER; note = 2'-O-methyluridine-3'-phosphate
  modified_base 13: mod_base = OTHER; note = 2'-O-methyluridine-3'-phosphate
  modified_base 14: mod_base = OTHER; note = 2'-O-methyladenosine-3'-phosphate
  modified_base 15: mod_base = OTHER; note = 2'-O-methylcytidine-3'-phosphate
  modified_base 16: mod_base = OTHER; note = 2'-O-methyladenosine-3'-phosphate
  modified_base 17: mod_base = OTHER; note = 2'-O-methyladenosine-3'-phosphate
  modified_base 18: mod_base = OTHER; note = 2'-O-methylguanosine-3'-phosphate
  modified_base 19: mod_base = OTHER; note = 2'-O-methyladenosine-3'-phosphorothioate
  modified_base 20: mod_base = OTHER; note = 2'-O-methyladenosine-3'-phosphorothioate
  modified_base 21: mod_base = OTHER; note = 2'-O-methyladenosine
aagccacaagattacaagaaa

SEQ ID NO: 1009 - RNA, 21 nt, synthetic construct
  source 1..21: mol_type = other RNA
  modified_base 1: mod_base = OTHER; note = 2'-O-methylcytidine-3'-phosphorothioate
  modified_base 2: mod_base = OTHER; note = 2'-O-methylcytidine-3'-phosphorothioate
  modified_base 3: mod_base = OTHER; note = 2'-O-methyladenosine-3'-phosphate
  modified_base 4: mod_base = OTHER; note = 2'-O-methylcytidine-3'-phosphate
  modified_base 5: mod_base = OTHER; note = 2'-O-methyladenosine-3'-phosphate
  modified_base 6: mod_base = OTHER; note = 2'-O-methyladenosine-3'-phosphate
  modified_base 7: mod_base = OTHER; note = 2'-deoxy-2'-fluoroguanosine-3'-phosphate
  modified_base 8: mod_base = OTHER; note = 2'-O-methyladenosine-3'-phosphate
  modified_base 9: mod_base = OTHER; note = 2'-deoxy-2'-fluorouridine-3'-phosphate
  modified_base 10: mod_base = OTHER; note = 2'-deoxy-2'-fluorouridine-3'-phosphate
  modified_base 11: mod_base = OTHER; note = 2'-deoxy-2'-fluoroadenosine-3'-phosphate
  modified_base 12: mod_base = OTHER; note = 2'-O-methylcytidine-3'-phosphate
  modified_base 13: mod_base = OTHER; note = 2'-O-methyladenosine-3'-phosphate
  modified_base 14: mod_base = OTHER; note = 2'-O-methyladenosine-3'-phosphate
  modified_base 15: mod_base = OTHER; note = 2'-O-methylguanosine-3'-phosphate
  modified_base 16: mod_base = OTHER; note = 2'-O-methyladenosine-3'-phosphate
  modified_base 17: mod_base = OTHER; note = 2'-O-methyladenosine-3'-phosphate
  modified_base 18: mod_base = OTHER; note = 2'-O-methyladenosine-3'-phosphate
  modified_base 19: mod_base = OTHER; note = 2'-O-methylcytidine-3'-phosphorothioate
  modified_base 20: mod_base = OTHER; note = 2'-O-methylguanosine-3'-phosphorothioate
  modified_base 21: mod_base = OTHER; note = 2'-O-methyladenosine
ccacaagattacaagaaacga

SEQ ID NO: 1010 - RNA, 21 nt, synthetic construct
  source 1..21: mol_type = other RNA
  modified_base 1: mod_base = OTHER; note = 2'-O-methyladenosine-3'-phosphorothioate
  modified_base 2: mod_base = OTHER; note = 2'-O-methyladenosine-3'-phosphorothioate
  modified_base 3: mod_base = OTHER; note = 2'-O-methylguanosine-3'-phosphate
  modified_base 4: mod_base = OTHER; note = 2'-O-methyladenosine-3'-phosphate
  modified_base 5: mod_base = OTHER; note = 2'-O-methyluridine-3'-phosphate
  modified_base 6: mod_base = OTHER; note = 2'-O-methyluridine-3'-phosphate
  modified_base 7: mod_base = OTHER; note = 2'-deoxy-2'-fluoroadenosine-3'-phosphate
  modified_base 8: mod_base = OTHER; note = 2'-O-methylcytidine-3'-phosphate
  modified_base 9: mod_base = OTHER; note = 2'-deoxy-2'-fluoroadenosine-3'-phosphate
  modified_base 10: mod_base = OTHER; note = 2'-deoxy-2'-fluoroadenosine-3'-phosphate
  modified_base 11: mod_base = OTHER; note = 2'-deoxy-2'-fluoroguanosine-3'-phosphate
  modified_base 12: mod_base = OTHER; note = 2'-O-methyladenosine-3'-phosphate
  modified_base 13: mod_base = OTHER; note = 2'-O-methyladenosine-3'-phosphate
  modified_base 14: mod_base = OTHER; note = 2'-O-methyladenosine-3'-phosphate
  modified_base 15: mod_base = OTHER; note = 2'-O-methylcytidine-3'-phosphate
  modified_base 16: mod_base = OTHER; note = 2'-O-methylguanosine-3'-phosphate
  modified_base 17: mod_base = OTHER; note = 2'-O-methylguanosine-3'-phosphate
  modified_base 18: mod_base = OTHER; note = 2'-O-methylcytidine-3'-phosphate
  modified_base 19: mod_base = OTHER; note = 2'-O-methyluridine-3'-phosphorothioate
  modified_base 20: mod_base = OTHER; note = 2'-O-methyluridine-3'-phosphorothioate
  modified_base 21: mod_base = OTHER; note = 2'-O-methyladenosine
aagattacaagaaacggctta

SEQ ID NO: 1011 - RNA, 21 nt, synthetic construct
  source 1..21: mol_type = other RNA
  modified_base 1: mod_base = OTHER; note = 2'-O-methyladenosine-3'-phosphorothioate
  modified_base 2: mod_base = OTHER; note = 2'-O-methyluridine-3'-phosphorothioate
  modified_base 3: mod_base = OTHER; note = 2'-O-methyluridine-3'-phosphate
  modified_base 4: mod_base = OTHER; note = 2'-O-methyladenosine-3'-phosphate
  modified_base 5: mod_base = OTHER; note = 2'-O-methylcytidine-3'-phosphate
  modified_base 6: mod_base = OTHER; note = 2'-O-methyladenosine-3'-phosphate
  modified_base 7: mod_base = OTHER; note = 2'-deoxy-2'-fluoroadenosine-3'-phosphate
  modified_base 8: mod_base = OTHER; note = 2'-O-methylguanosine-3'-phosphate
  modified_base 9: mod_base = OTHER; note = 2'-deoxy-2'-fluoroadenosine-3'-phosphate
  modified_base 10: mod_base = OTHER; note = 2'-deoxy-2'-fluoroadenosine-3'-phosphate
  modified_base 11: mod_base = OTHER; note = 2'-deoxy-2'-fluoroadenosine-3'-phosphate
  modified_base 12: mod_base = OTHER; note = 2'-O-methylcytidine-3'-phosphate
  modified_base 13: mod_base = OTHER; note = 2'-O-methylguanosine-3'-phosphate
  modified_base 14: mod_base = OTHER; note = 2'-O-methylguanosine-3'-phosphate
  modified_base 15: mod_base = OTHER; note = 2'-O-methylcytidine-3'-phosphate
  modified_base 16: mod_base = OTHER; note = 2'-O-methyluridine-3'-phosphate
  modified_base 17: mod_base = OTHER; note = 2'-O-methyluridine-3'-phosphate
  modified_base 18: mod_base = OTHER; note = 2'-O-methyluridine-3'-phosphate
  modified_base 19: mod_base = OTHER; note = 2'-O-methylcytidine-3'-phosphorothioate
  modified_base 20: mod_base = OTHER; note = 2'-O-methyladenosine-3'-phosphorothioate
  modified_base 21: mod_base = OTHER; note = 2'-O-methyladenosine
attacaagaaacggctttcaa

SEQ ID NO: 1012 - RNA, 21 nt, synthetic construct
  source 1..21: mol_type = other RNA
  modified_base 1: mod_base = OTHER; note = 2'-O-methylguanosine-3'-phosphorothioate
  modified_base 2: mod_base = OTHER; note = 2'-O-methylguanosine-3'-phosphorothioate
  modified_base 3: mod_base = OTHER; note = 2'-O-methylcytidine-3'-phosphate
  modified_base 4: mod_base = OTHER; note = 2'-O-methyluridine-3'-phosphate
  modified_base 5: mod_base = OTHER; note = 2'-O-methyluridine-3'-phosphate
  modified_base 6: mod_base = OTHER; note = 2'-O-methyluridine-3'-phosphate
  modified_base 7: mod_base = OTHER; note = 2'-deoxy-2'-fluorocytidine-3'-phosphate
  modified_base 8: mod_base = OTHER; note = 2'-O-methyladenosine-3'-phosphate
  modified_base 9: mod_base = OTHER; note = 2'-deoxy-2'-fluoroguanosine-3'-phosphate
  modified_base 10: mod_base = OTHER; note = 2'-deoxy-2'-fluorouridine-3'-phosphate
  modified_base 11: mod_base = OTHER; note = 2'-deoxy-2'-fluorouridine-3'-phosphate
  modified_base 12: mod_base = OTHER; note = 2'-O-methylguanosine-3'-phosphate
  modified_base 13: mod_base = OTHER; note = 2'-O-methyladenosine-3'-phosphate
  modified_base 14: mod_base = OTHER; note = 2'-O-methylguanosine-3'-phosphate
  modified_base 15: mod_base = OTHER; note = 2'-O-methylcytidine-3'-phosphate
  modified_base 16: mod_base = OTHER; note = 2'-O-methyluridine-3'-phosphate
  modified_base 17: mod_base = OTHER; note = 2'-O-methylguanosine-3'-phosphate
  modified_base 18: mod_base = OTHER; note = 2'-O-methyladenosine-3'-phosphate
  modified_base 19: mod_base = OTHER; note = 2'-O-methylcytidine-3'-phosphorothioate
  modified_base 20: mod_base = OTHER; note = 2'-O-methylcytidine-3'-phosphorothioate
  modified_base 21: mod_base = OTHER; note = 2'-O-methyladenosine
ggctttcagttgagctgacca

SEQ ID NO: 1013 - RNA, 21 nt, synthetic construct
  source 1..21: mol_type = other RNA
  modified_base 1: mod_base = OTHER; note = 2'-O-methyluridine-3'-phosphorothioate
  modified_base 2: mod_base = OTHER; note = 2'-O-methylguanosine-3'-phosphorothioate
  modified_base 3: mod_base = OTHER; note = 2'-O-methyladenosine-3'-phosphate
  modified_base 4: mod_base = OTHER; note = 2'-O-methylguanosine-3'-phosphate
  modified_base 5: mod_base = OTHER; note = 2'-O-methylcytidine-3'-phosphate
  modified_base 6: mod_base = OTHER; note = 2'-O-methyluridine-3'-phosphate
  modified_base 7: mod_base = OTHER; note = 2'-deoxy-2'-fluoroguanosine-3'-phosphate
  modified_base 8: mod_base = OTHER; note = 2'-O-methyladenosine-3'-phosphate
  modified_base 9: mod_base = OTHER; note = 2'-deoxy-2'-fluorocytidine-3'-phosphate
  modified_base 10: mod_base = OTHER; note = 2'-deoxy-2'-fluorocytidine-3'-phosphate
  modified_base 11: mod_base = OTHER; note = 2'-deoxy-2'-fluoroadenosine-3'-phosphate
  modified_base 12: mod_base = OTHER; note = 2'-O-methylguanosine-3'-phosphate
  modified_base 13: mod_base = OTHER; note = 2'-O-methylcytidine-3'-phosphate
  modified_base 14: mod_base = OTHER; note = 2'-O-methyluridine-3'-phosphate
  modified_base 15: mod_base = OTHER; note = 2'-O-methylcytidine-3'-phosphate
  modified_base 16: mod_base = OTHER; note = 2'-O-methyluridine-3'-phosphate
  modified_base 17: mod_base = OTHER; note = 2'-O-methylcytidine-3'-phosphate
  modified_base 18: mod_base = OTHER; note = 2'-O-methyluridine-3'-phosphate
  modified_base 19: mod_base = OTHER; note = 2'-O-methylcytidine-3'-phosphorothioate
  modified_base 20: mod_base = OTHER; note = 2'-O-methyluridine-3'-phosphorothioate
  modified_base 21: mod_base = OTHER; note = 2'-O-methyladenosine
tgagctgaccagctctctcta

SEQ ID NO: 1014 - RNA, 21 nt, synthetic construct
  source 1..21: mol_type = other RNA
  modified_base 1: mod_base = OTHER; note = 2'-O-methylguanosine-3'-phosphorothioate
  modified_base 2: mod_base = OTHER; note = 2'-O-methyladenosine-3'-phosphorothioate
  modified_base 3: mod_base = OTHER; note = 2'-O-methylguanosine-3'-phosphate
  modified_base 4: mod_base = OTHER; note = 2'-O-methylcytidine-3'-phosphate
  modified_base 5: mod_base = OTHER; note = 2'-O-methylcytidine-3'-phosphate
  modified_base 6: mod_base = OTHER; note = 2'-O-methyladenosine-3'-phosphate
  modified_base 7: mod_base = OTHER; note = 2'-deoxy-2'-fluoroadenosine-3'-phosphate
  modified_base 8: mod_base = OTHER; note = 2'-O-methyluridine-3'-phosphate
  modified_base 9: mod_base = OTHER; note = 2'-deoxy-2'-fluoroguanosine-3'-phosphate
  modified_base 10: mod_base = OTHER; note = 2'-deoxy-2'-fluoroguanosine-3'-phosphate
  modified_base 11: mod_base = OTHER; note = 2'-deoxy-2'-fluorocytidine-3'-phosphate
  modified_base 12: mod_base = OTHER; note = 2'-O-methyluridine-3'-phosphate
  modified_base 13: mod_base = OTHER; note = 2'-O-methyluridine-3'-phosphate
  modified_base 14: mod_base = OTHER; note = 2'-O-methylguanosine-3'-phosphate
  modified_base 15: mod_base = OTHER; note = 2'-O-methylguanosine-3'-phosphate
  modified_base 16: mod_base = OTHER; note = 2'-O-methyladenosine-3'-phosphate
  modified_base 17: mod_base = OTHER; note = 2'-O-methyladenosine-3'-phosphate
  modified_base 18: mod_base = OTHER; note = 2'-O-methyluridine-3'-phosphate
  modified_base 19: mod_base = OTHER; note = 2'-O-methylguanosine-3'-phosphorothioate
  modified_base 20: mod_base = OTHER; note = 2'-O-methyladenosine-3'-phosphorothioate
  modified_base 21: mod_base = OTHER; note = 2'-O-methyladenosine
gagccaatggcttggaatgaa

SEQ ID NO: 1015 - RNA, 21 nt, synthetic construct
  source 1..21: mol_type = other RNA
  modified_base 1: mod_base = OTHER; note = 2'-O-methylcytidine-3'-phosphorothioate
  modified_base 2: mod_base = OTHER; note = 2'-O-methyluridine-3'-phosphorothioate
  modified_base 3: mod_base = OTHER; note = 2'-O-methylguanosine-3'-phosphate
  modified_base 4: mod_base = OTHER; note = 2'-O-methyladenosine-3'-phosphate
  modified_base 5: mod_base = OTHER; note = 2'-O-methyluridine-3'-phosphate
  modified_base 6: mod_base = OTHER; note = 2'-O-methylcytidine-3'-phosphate
  modified_base 7: mod_base = OTHER; note = 2'-deoxy-2'-fluorouridine-3'-phosphate
  modified_base 8: mod_base = OTHER; note = 2'-O-methyluridine-3'-phosphate
  modified_base 9: mod_base = OTHER; note = 2'-deoxy-2'-fluoroguanosine-3'-phosphate
  modified_base 10: mod_base = OTHER; note = 2'-deoxy-2'-fluoroguanosine-3'-phosphate
  modified_base 11: mod_base = OTHER; note = 2'-deoxy-2'-fluoroadenosine-3'-phosphate
  modified_base 12: mod_base = OTHER; note = 2'-O-methylcytidine-3'-phosphate
  modified_base 13: mod_base = OTHER; note = 2'-O-methyluridine-3'-phosphate
  modified_base 14: mod_base = OTHER; note = 2'-O-methyluridine-3'-phosphate
  modified_base 15: mod_base = OTHER; note = 2'-O-methylguanosine-3'-phosphate
  modified_base 16: mod_base = OTHER; note = 2'-O-methyladenosine-3'-phosphate
  modified_base 17: mod_base = OTHER; note = 2'-O-methyluridine-3'-phosphate
  modified_base 18: mod_base = OTHER; note = 2'-O-methyladenosine-3'-phosphate
  modified_base 19: mod_base = OTHER; note = 2'-O-methyluridine-3'-phosphorothioate
  modified_base 20: mod_base = OTHER; note = 2'-O-methyluridine-3'-phosphorothioate
  modified_base 21: mod_base = OTHER; note = 2'-O-methyladenosine
ctgatcttggacttgatatta

SEQ ID NO: 1016 - RNA, 21 nt, synthetic construct
  source 1..21: mol_type = other RNA
  modified_base 1: mod_base = OTHER; note = 2'-O-methyluridine-3'-phosphorothioate
  modified_base 2: mod_base = OTHER; note = 2'-O-methylguanosine-3'-phosphorothioate
  modified_base 3: mod_base = OTHER; note = 2'-O-methylguanosine-3'-phosphate
  modified_base 4: mod_base = OTHER; note = 2'-O-methyluridine-3'-phosphate
  modified_base 5: mod_base = OTHER; note = 2'-O-methyluridine-3'-phosphate
  modified_base 6: mod_base = OTHER; note = 2'-O-methyluridine-3'-phosphate
  modified_base 7: mod_base = OTHER; note = 2'-deoxy-2'-fluoroguanosine-3'-phosphate
  modified_base 8: mod_base = OTHER; note = 2'-O-methyladenosine-3'-phosphate
  modified_base 9: mod_base = OTHER; note = 2'-deoxy-2'-fluorouridine-3'-phosphate
  modified_base 10: mod_base = OTHER; note = 2'-deoxy-2'-fluoroadenosine-3'-phosphate
  modified_base 11: mod_base = OTHER; note = 2'-deoxy-2'-fluorocytidine-3'-phosphate
  modified_base 12: mod_base = OTHER; note = 2'-O-methyluridine-3'-phosphate
  modified_base 13: mod_base = OTHER; note = 2'-O-methylguanosine-3'-phosphate
  modified_base 14: mod_base = OTHER; note = 2'-O-methyladenosine-3'-phosphate
  modified_base 15: mod_base = OTHER; note = 2'-O-methylcytidine-3'-phosphate
  modified_base 16: mod_base = OTHER; note = 2'-O-methylcytidine-3'-phosphate
  modified_base 17: mod_base = OTHER; note = 2'-O-methyluridine-3'-phosphate
  modified_base 18: mod_base = OTHER; note = 2'-O-methylguanosine-3'-phosphate
  modified_base 19: mod_base = OTHER; note = 2'-O-methyluridine-3'-phosphorothioate
  modified_base 20: mod_base = OTHER; note = 2'-O-methyladenosine-3'-phosphorothioate
  modified_base 21: mod_base = OTHER; note = 2'-O-methyladenosine
tggtttgatactgacctgtaa

SEQ ID NO: 1017 - RNA, 21 nt, synthetic construct
  source 1..21: mol_type = other RNA
  modified_base 1: mod_base = OTHER; note = 2'-O-methyluridine-3'-phosphorothioate
  modified_base 2: mod_base = OTHER; note = 2'-O-methyluridine-3'-phosphorothioate
  modified_base 3: mod_base = OTHER; note = 2'-O-methyluridine-3'-phosphate
  modified_base 4: mod_base = OTHER; note = 2'-O-methylguanosine-3'-phosphate
  modified_base 5: mod_base = OTHER; note = 2'-O-methyladenosine-3'-phosphate
  modified_base 6: mod_base = OTHER; note = 2'-O-methyluridine-3'-phosphate
  modified_base 7: mod_base = OTHER; note = 2'-deoxy-2'-fluoroadenosine-3'-phosphate
  modified_base 8: mod_base = OTHER; note = 2'-O-methylcytidine-3'-phosphate
  modified_base 9: mod_base = OTHER; note = 2'-deoxy-2'-fluorouridine-3'-phosphate
  modified_base 10: mod_base = OTHER; note = 2'-deoxy-2'-fluoroguanosine-3'-phosphate
  modified_base 11: mod_base = OTHER; note = 2'-deoxy-2'-fluoroadenosine-3'-phosphate
  modified_base 12: mod_base = OTHER; note = 2'-O-methylcytidine-3'-phosphate
  modified_base 13: mod_base = OTHER; note = 2'-O-methylcytidine-3'-phosphate
  modified_base 14: mod_base = OTHER; note = 2'-O-methyluridine-3'-phosphate
  modified_base 15: mod_base = OTHER; note = 2'-O-methylguanosine-3'-phosphate
  modified_base 16: mod_base = OTHER; note = 2'-O-methyluridine-3'-phosphate
  modified_base 17: mod_base = OTHER; note = 2'-O-methyladenosine-3'-phosphate
  modified_base 18: mod_base = OTHER; note = 2'-O-methyladenosine-3'-phosphate
  modified_base 19: mod_base = OTHER; note = 2'-O-methyladenosine-3'-phosphorothioate
  modified_base 20: mod_base = OTHER; note = 2'-O-methyluridine-3'-phosphorothioate
  modified_base 21: mod_base = OTHER; note = 2'-O-methyladenosine
tttgatactgacctgtaaata

SEQ ID NO: 1018 - RNA, 21 nt, synthetic construct
  source 1..21: mol_type = other RNA
  modified_base 1: mod_base = OTHER; note = 2'-O-methylguanosine-3'-phosphorothioate
  modified_base 2: mod_base = OTHER; note = 2'-O-methylguanosine-3'-phosphorothioate
  modified_base 3: mod_base = OTHER; note = 2'-O-methylcytidine-3'-phosphate
  modified_base 4: mod_base = OTHER; note = 2'-O-methyluridine-3'-phosphate
  modified_base 5: mod_base = OTHER; note = 2'-O-methyladenosine-3'-phosphate
  modified_base 6: mod_base = OTHER; note = 2'-O-methyluridine-3'-phosphate
  modified_base 7: mod_base = OTHER; note = 2'-deoxy-2'-fluorouridine-3'-phosphate
  modified_base 8: mod_base = OTHER; note = 2'-O-methyluridine-3'-phosphate
  modified_base 9: mod_base = OTHER; note = 2'-deoxy-2'-fluoroguanosine-3'-phosphate
  modified_base 10: mod_base = OTHER; note = 2'-deoxy-2'-fluorouridine-3'-phosphate
  modified_base 11: mod_base = OTHER; note = 2'-deoxy-2'-fluoroadenosine-3'-phosphate
  modified_base 12: mod_base = OTHER; note = 2'-O-methyladenosine-3'-phosphate
  modified_base 13: mod_base = OTHER; note = 2'-O-methyladenosine-3'-phosphate
  modified_base 14: mod_base = OTHER; note = 2'-O-methyluridine-3'-phosphate
  modified_base 15: mod_base = OTHER; note = 2'-O-methylcytidine-3'-phosphate
  modified_base 16: mod_base = OTHER; note = 2'-O-methyluridine-3'-phosphate
  modified_base 17: mod_base = OTHER; note = 2'-O-methylguanosine-3'-phosphate
  modified_base 18: mod_base = OTHER; note = 2'-O-methylcytidine-3'-phosphate
  modified_base 19: mod_base = OTHER; note = 2'-O-methylcytidine-3'-phosphorothioate
  modified_base 20: mod_base = OTHER; note = 2'-O-methyladenosine-3'-phosphorothioate
  modified_base 21: mod_base = OTHER; note = 2'-O-methyladenosine
ggctatttgtaaatctgccaa

SEQ ID NO: 1019 - RNA, 21 nt, synthetic construct
  source 1..21: mol_type = other RNA
  modified_base 1: mod_base = OTHER; note = 2'-O-methyluridine-3'-phosphorothioate
  modified_base 2: mod_base = OTHER; note = 2'-O-methyluridine-3'-phosphorothioate
  modified_base 3: mod_base = OTHER; note = 2'-O-methyluridine-3'-phosphate
  modified_base 4: mod_base = OTHER; note = 2'-O-methylcytidine-3'-phosphate
  modified_base 5: mod_base = OTHER; note = 2'-O-methyluridine-3'-phosphate
  modified_base 6: mod_base = OTHER; note = 2'-O-methylguanosine-3'-phosphate
  modified_base 7: mod_base = OTHER; note = 2'-deoxy-2'-fluoroguanosine-3'-phosphate
  modified_base 8: mod_base = OTHER; note = 2'-O-methyluridine-3'-phosphate
  modified_base 9: mod_base = OTHER; note = 2'-deoxy-2'-fluorouridine-3'-phosphate
  modified_base 10: mod_base = OTHER; note = 2'-deoxy-2'-fluoroguanosine-3'-phosphate
  modified_base 11: mod_base = OTHER; note = 2'-deoxy-2'-fluorouridine-3'-phosphate
  modified_base 12: mod_base = OTHER; note = 2'-O-methyluridine-3'-phosphate
  modified_base 13: mod_base = OTHER; note = 2'-O-methyladenosine-3'-phosphate
  modified_base 14: mod_base = OTHER; note = 2'-O-methyluridine-3'-phosphate
  modified_base 15: mod_base = OTHER; note = 2'-O-methylguanosine-3'-phosphate
  modified_base 16: mod_base = OTHER; note = 2'-O-methyluridine-3'-phosphate
  modified_base 17: mod_base = OTHER; note = 2'-O-methylguanosine-3'-phosphate
  modified_base 18: mod_base = OTHER; note = 2'-O-methyladenosine-3'-phosphate
  modified_base 19: mod_base = OTHER; note = 2'-O-methyluridine-3'-phosphorothioate
  modified_base 20: mod_base = OTHER; note = 2'-O-methylcytidine-3'-phosphorothioate
  modified_base 21: mod_base = OTHER; note = 2'-O-methyladenosine
tttctggttgttatgtgatca

SEQ ID NO: 1020 - RNA, 21 nt, synthetic construct
  source 1..21: mol_type = other RNA
  modified_base 1: mod_base = OTHER; note = 2'-O-methylguanosine-3'-phosphorothioate
  modified_base 2: mod_base = OTHER; note = 2'-O-methyladenosine-3'-phosphorothioate
  modified_base 3: mod_base = OTHER; note = 2'-O-methyluridine-3'-phosphate
  modified_base 4: mod_base = OTHER; note = 2'-O-methylcytidine-3'-phosphate
  modified_base 5: mod_base = OTHER; note = 2'-O-methyladenosine-3'-phosphate
  modified_base 6: mod_base = OTHER; note = 2'-O-methyluridine-3'-phosphate
  modified_base 7: mod_base = OTHER; note = 2'-deoxy-2'-fluoroguanosine-3'-phosphate
  modified_base 8: mod_base = OTHER; note = 2'-O-methyluridine-3'-phosphate
  modified_base 9: mod_base = OTHER; note = 2'-deoxy-2'-fluoroguanosine-3'-phosphate
  modified_base 10: mod_base = OTHER; note = 2'-deoxy-2'-fluorouridine-3'-phosphate
  modified_base 11: mod_base = OTHER; note = 2'-deoxy-2'-fluoroguanosine-3'-phosphate
  modified_base 12: mod_base = OTHER; note = 2'-O-methylguanosine-3'-phosphate
  modified_base 13: mod_base = OTHER; note = 2'-O-methyladenosine-3'-phosphate
  modified_base 14: mod_base = OTHER; note = 2'-O-methyladenosine-3'-phosphate
  modified_base 15: mod_base = OTHER; note = 2'-O-methylguanosine-3'-phosphate
  modified_base 16: mod_base = OTHER; note = 2'-O-methyluridine-3'-phosphate
  modified_base 17: mod_base = OTHER; note = 2'-O-methyluridine-3'-phosphate
  modified_base 18: mod_base = OTHER; note = 2'-O-methyladenosine-3'-phosphate
  modified_base 19: mod_base = OTHER; note = 2'-O-methyluridine-3'-phosphorothioate
  modified_base 20: mod_base = OTHER; note = 2'-O-methyluridine-3'-phosphorothioate
  modified_base 21: mod_base = OTHER; note = 2'-O-methyladenosine
gatcatgtgtggaagttatta

SEQ ID NO: 1021 - RNA, 21 nt, synthetic construct
  source 1..21: mol_type = other RNA
  modified_base 1: mod_base = OTHER; note = 2'-O-methyluridine-3'-phosphorothioate
  modified_base 2: mod_base = OTHER; note = 2'-O-methyladenosine-3'-phosphorothioate
  modified_base 3: mod_base = OTHER; note = 2'-O-methyladenosine-3'-phosphate
  modified_base 4: mod_base = OTHER; note = 2'-O-methyluridine-3'-phosphate
  modified_base 5: mod_base = OTHER; note = 2'-O-methyladenosine-3'-phosphate
  modified_base 6: mod_base = OTHER; note = 2'-O-methylcytidine-3'-phosphate
  modified_base 7: mod_base = OTHER; note = 2'-deoxy-2'-fluorouridine-3'-phosphate
  modified_base 8: mod_base = OTHER; note = 2'-O-methylcytidine-3'-phosphate
  modified_base 9: mod_base = OTHER; note = 2'-deoxy-2'-fluoroadenosine-3'-phosphate
  modified_base 10: mod_base = OTHER; note = 2'-deoxy-2'-fluoroadenosine-3'-phosphate
  modified_base 11: mod_base = OTHER; note = 2'-deoxy-2'-fluoroadenosine-3'-phosphate
  modified_base 12: mod_base = OTHER; note = 2'-O-methyluridine-3'-phosphate
  modified_base 13: mod_base = OTHER; note = 2'-O-methylguanosine-3'-phosphate
  modified_base 14: mod_base = OTHER; note = 2'-O-methyladenosine-3'-phosphate
  modified_base 15: mod_base = OTHER; note = 2'-O-methylguanosine-3'-phosphate
  modified_base 16: mod_base = OTHER; note = 2'-O-methyluridine-3'-phosphate
  modified_base 17: mod_base = OTHER; note = 2'-O-methyladenosine-3'-phosphate
  modified_base 18: mod_base = OTHER; note = 2'-O-methyladenosine-3'-phosphate
  modified_base 19: mod_base = OTHER; note = 2'-O-methylcytidine-3'-phosphorothioate
  modified_base 20: mod_base = OTHER; note = 2'-O-methyladenosine-3'-phosphorothioate
  modified_base 21: mod_base = OTHER; note = 2'-O-methyladenosine
taatactcaaatgagtaacaa

SEQ ID NO: 1022 - RNA, 21 nt, synthetic construct
  source 1..21: mol_type = other RNA
  modified_base 1: mod_base = OTHER; note = 2'-O-methyladenosine-3'-phosphorothioate
  modified_base 2: mod_base = OTHER; note = 2'-O-methyluridine-3'-phosphorothioate
  modified_base 3: mod_base = OTHER; note = 2'-O-methyluridine-3'-phosphate
  modified_base 4: mod_base = OTHER; note = 2'-O-methylguanosine-3'-phosphate
  modified_base 5: mod_base = OTHER; note = 2'-O-methyluridine-3'-phosphate
  modified_base 6: mod_base = OTHER; note = 2'-O-methylcytidine-3'-phosphate
  modified_base 7: mod_base = OTHER; note = 2'-deoxy-2'-fluorouridine-3'-phosphate
  modified_base 8: mod_base = OTHER; note = 2'-O-methylguanosine-3'-phosphate
  modified_base 9: mod_base = OTHER; note = 2'-deoxy-2'-fluoroadenosine-3'-phosphate
  modified_base 10: mod_base = OTHER; note = 2'-deoxy-2'-fluoroadenosine-3'-phosphate
  modified_base 11: mod_base = OTHER; note = 2'-deoxy-2'-fluorocytidine-3'-phosphate
  modified_base 12: mod_base = OTHER; note = 2'-O-methyluridine-3'-phosphate
  modified_base 13: mod_base = OTHER; note = 2'-O-methyluridine-3'-phosphate
  modified_base 14: mod_base = OTHER; note = 2'-O-methylguanosine-3'-phosphate
  modified_base 15: mod_base = OTHER; note = 2'-O-methylcytidine-3'-phosphate
  modified_base 16: mod_base = OTHER; note = 2'-O-methyladenosine-3'-phosphate
  modified_base 17: mod_base = OTHER; note = 2'-O-methyluridine-3'-phosphate
  modified_base 18: mod_base = OTHER; note = 2'-O-methyluridine-3'-phosphate
  modified_base 19: mod_base = OTHER; note = 2'-O-methylguanosine-3'-phosphorothioate
  modified_base 20: mod_base = OTHER; note = 2'-O-methyluridine-3'-phosphorothioate
  modified_base 21: mod_base = OTHER; note = 2'-O-methyladenosine
attgtctgaacttgcattgta

SEQ ID NO: 1023 - RNA, 21 nt, synthetic construct
  source 1..21: mol_type = other RNA
  modified_base 1: mod_base = OTHER; note = 2'-O-methylcytidine-3'-phosphorothioate
  modified_base 2: mod_base = OTHER; note = 2'-O-methyladenosine-3'-phosphorothioate
  modified_base 3: mod_base = OTHER; note = 2'-O-methylguanosine-3'-phosphate
  modified_base 4: mod_base = OTHER; note = 2'-O-methyladenosine-3'-phosphate
  modified_base 5: mod_base = OTHER; note = 2'-O-methyladenosine-3'-phosphate
  modified_base 6: mod_base = OTHER; note = 2'-O-methyladenosine-3'-phosphate
  modified_base 7: mod_base = OTHER; note = 2'-deoxy-2'-fluoroguanosine-3'-phosphate
  modified_base 8: mod_base = OTHER; note = 2'-O-methyluridine-3'-phosphate
  modified_base 9: mod_base = OTHER; note = 2'-deoxy-2'-fluoroguanosine-3'-phosphate
  modified_base 10: mod_base = OTHER; note = 2'-deoxy-2'-fluorocytidine-3'-phosphate
  modified_base 11: mod_base = OTHER; note = 2'-deoxy-2'-fluorocytidine-3'-phosphate
  modified_base 12: mod_base = OTHER; note = 2'-O-methyluridine-3'-phosphate
  modified_base 13: mod_base = OTHER; note = 2'-O-methylguanosine-3'-phosphate
  modified_base 14: mod_base = OTHER; note = 2'-O-methyladenosine-3'-phosphate
  modified_base 15: mod_base = OTHER; note = 2'-O-methylcytidine-3'-phosphate
  modified_base 16: mod_base = OTHER; note = 2'-O-methyladenosine-3'-phosphate
  modified_base 17: mod_base = OTHER; note = 2'-O-methylcytidine-3'-phosphate
  modified_base 18: mod_base = OTHER; note = 2'-O-methyladenosine-3'-phosphate
  modified_base 19: mod_base = OTHER; note = 2'-O-methylcytidine-3'-phosphorothioate
  modified_base 20: mod_base = OTHER; note = 2'-O-methyluridine-3'-phosphorothioate
  modified_base 21: mod_base = OTHER; note = 2'-O-methyladenosine
cagaaagtgcctgacacacta

SEQ ID NO: 1024 - RNA, 21 nt, synthetic construct
  source 1..21: mol_type = other RNA
  modified_base 1: mod_base = OTHER; note = 2'-O-methylguanosine-3'-phosphorothioate
  modified_base 2: mod_base = OTHER; note = 2'-O-methyladenosine-3'-phosphorothioate
  modified_base 3: mod_base = OTHER; note = 2'-O-methyladenosine-3'-phosphate
  modified_base 4: mod_base = OTHER; note = 2'-O-methyladenosine-3'-phosphate
  modified_base 5: mod_base = OTHER; note = 2'-O-methylguanosine-3'-phosphate
  modified_base 6: mod_base = OTHER; note = 2'-O-methyluridine-3'-phosphate
  modified_base 7: mod_base = OTHER; note = 2'-deoxy-2'-fluoroguanosine-3'-phosphate
  modified_base 8: mod_base = OTHER; note = 2'-O-methylcytidine-3'-phosphate
  modified_base 9: mod_base = OTHER; note = 2'-deoxy-2'-fluorocytidine-3'-phosphate
  modified_base 10: mod_base = OTHER; note = 2'-deoxy-2'-fluorouridine-3'-phosphate
  modified_base 11: mod_base = OTHER; note = 2'-deoxy-2'-fluoroguanosine-3'-phosphate
  modified_base 12: mod_base = OTHER; note = 2'-O-methyladenosine-3'-phosphate
  modified_base 13: mod_base = OTHER; note = 2'-O-methylcytidine-3'-phosphate
  modified_base 14: mod_base = OTHER; note = 2'-O-methyladenosine-3'-phosphate
  modified_base 15: mod_base = OTHER; note = 2'-O-methylcytidine-3'-phosphate
  modified_base 16: mod_base = OTHER; note = 2'-O-methyladenosine-3'-phosphate
  modified_base 17: mod_base = OTHER; note = 2'-O-methylcytidine-3'-phosphate
  modified_base 18: mod_base = OTHER; note = 2'-O-methyluridine-3'-phosphate
  modified_base 19: mod_base = OTHER; note = 2'-O-methyladenosine-3'-phosphorothioate
  modified_base 20: mod_base = OTHER; note = 2'-O-methyladenosine-3'-phosphorothioate
  modified_base 21: mod_base = OTHER; note = 2'-O-methyladenosine
gaaagtgcctgacacactaaa

SEQ ID NO: 1025 - RNA, 21 nt, synthetic construct
  source 1..21: mol_type = other RNA
  modified_base 1: mod_base = OTHER; note = 2'-O-methylguanosine-3'-phosphorothioate
  modified_base 2: mod_base = OTHER; note = 2'-O-methylcytidine-3'-phosphorothioate
  modified_base 3: mod_base = OTHER; note = 2'-O-methylcytidine-3'-phosphate
  modified_base 4: mod_base = OTHER; note = 2'-O-methyluridine-3'-phosphate
  modified_base 5: mod_base = OTHER; note = 2'-O-methylguanosine-3'-phosphate
  modified_base 6: mod_base = OTHER; note = 2'-O-methyladenosine-3'-phosphate
  modified_base 7: mod_base = OTHER; note = 2'-deoxy-2'-fluorocytidine-3'-phosphate
  modified_base 8: mod_base = OTHER; note = 2'-O-methyladenosine-3'-phosphate
  modified_base 9: mod_base = OTHER; note = 2'-deoxy-2'-fluorocytidine-3'-phosphate
  modified_base 10: mod_base = OTHER; note = 2'-deoxy-2'-fluoroadenosine-3'-phosphate
  modified_base 11: mod_base = OTHER; note = 2'-deoxy-2'-fluorocytidine-3'-phosphate
  modified_base 12: mod_base = OTHER; note = 2'-O-methyluridine-3'-phosphate
  modified_base 13: mod_base = OTHER; note = 2'-O-methyladenosine-3'-phosphate
  modified_base 14: mod_base = OTHER; note = 2'-O-methyladenosine-3'-phosphate
  modified_base 15: mod_base = OTHER; note = 2'-O-methylcytidine-3'-phosphate
  modified_base 16: mod_base = OTHER; note = 2'-O-methylcytidine-3'-phosphate
  modified_base 17: mod_base = OTHER; note = 2'-O-methyladenosine-3'-phosphate
  modified_base 18: mod_base = OTHER; note = 2'-O-methyladenosine-3'-phosphate
  modified_base 19: mod_base = OTHER; note = 2'-O-methylguanosine-3'-phosphorothioate
  modified_base 20: mod_base = OTHER; note = 2'-O-methylcytidine-3'-phosphorothioate
  modified_base 21: mod_base = OTHER; note = 2'-O-methyladenosine
gcctgacacactaaccaagca

SEQ ID NO: 1026 - RNA, 21 nt, synthetic construct
  source 1..21: mol_type = other RNA
  modified_base 1: mod_base = OTHER; note = 2'-O-methyluridine-3'-phosphorothioate
  modified_base 2: mod_base = OTHER; note = 2'-O-methylguanosine-3'-phosphorothioate
  modified_base 3: mod_base = OTHER; note = 2'-O-methylguanosine-3'-phosphate
  modified_base 4: mod_base = OTHER; note = 2'-O-methylguanosine-3'-phosphate
  modified_base 5: mod_base = OTHER; note = 2'-O-methyladenosine-3'-phosphate
  modified_base 6: mod_base = OTHER; note = 2'-O-methyladenosine-3'-phosphate
  modified_base 7: mod_base = OTHER; note = 2'-deoxy-2'-fluorocytidine-3'-phosphate
  modified_base 8: mod_base = OTHER; note = 2'-O-methyladenosine-3'-phosphate
  modified_base 9: mod_base = OTHER; note = 2'-deoxy-2'-fluoroadenosine-3'-phosphate
  modified_base 10: mod_base = OTHER; note = 2'-deoxy-2'-fluorouridine-3'-phosphate
  modified_base 11: mod_base = OTHER; note = 2'-deoxy-2'-fluorouridine-3'-phosphate
  modified_base 12: mod_base = OTHER; note = 2'-O-methylguanosine-3'-phosphate
  modified_base 13: mod_base = OTHER; note = 2'-O-methyladenosine-3'-phosphate
  modified_base 14: mod_base = OTHER; note = 2'-O-methyladenosine-3'-phosphate
  modified_base 15: mod_base = OTHER; note = 2'-O-methylguanosine-3'-phosphate
  modified_base 16: mod_base = OTHER; note = 2'-O-methyluridine-3'-phosphate
  modified_base 17: mod_base = OTHER; note = 2'-O-methyladenosine-3'-phosphate
  modified_base 18: mod_base = OTHER; note = 2'-O-methyladenosine-3'-phosphate
  modified_base 19: mod_base = OTHER; note = 2'-O-methyladenosine-3'-phosphorothioate
  modified_base 20: mod_base = OTHER; note = 2'-O-methylcytidine-3'-phosphorothioate
  modified_base 21: mod_base = OTHER; note = 2'-O-methyladenosine
tgggaacaattgaagtaaaca

SEQ ID NO: 1027 - RNA, 21 nt, synthetic construct
  source 1..21: mol_type = other RNA
  modified_base 1: mod_base = OTHER; note = 2'-O-methyladenosine-3'-phosphorothioate
  modified_base 2: mod_base = OTHER; note = 2'-O-methyluridine-3'-phosphorothioate
  modified_base 3: mod_base = OTHER; note = 2'-O-methylguanosine-3'-phosphate
  modified_base 4: mod_base = OTHER; note = 2'-O-methylguanosine-3'-phosphate
  modified_base 5: mod_base = OTHER; note = 2'-O-methyladenosine-3'-phosphate
  modified_base 6: mod_base = OTHER; note = 2'-O-methyluridine-3'-phosphate
  modified_base 7: mod_base = OTHER; note = 2'-deoxy-2'-fluorocytidine-3'-phosphate
  modified_base 8: mod_base = OTHER; note = 2'-O-methyladenosine-3'-phosphate
  modified_base 9: mod_base = OTHER; note = 2'-deoxy-2'-fluorocytidine-3'-phosphate
  modified_base 10: mod_base = OTHER; note = 2'-deoxy-2'-fluoroadenosine-3'-phosphate
  modified_base 11: mod_base = OTHER; note = 2'-deoxy-2'-fluoroadenosine-3'-phosphate
  modified_base 12: mod_base = OTHER; note = 2'-O-methylguanosine-3'-phosphate
  modified_base 13: mod_base = OTHER; note = 2'-O-methyladenosine-3'-phosphate
  modified_base 14: mod_base = OTHER; note = 2'-O-methyluridine-3'-phosphate
  modified_base 15: mod_base = OTHER; note = 2'-O-methylguanosine-3'-phosphate
  modified_base 16: mod_base = OTHER; note = 2'-O-methylguanosine-3'-phosphate
  modified_base 17: mod_base = OTHER; note = 2'-O-methyladenosine-3'-phosphate
  modified_base 18: mod_base = OTHER; note = 2'-O-methyladenosine-3'-phosphate
  modified_base 19: mod_base = OTHER; note = 2'-O-methyluridine-3'-phosphorothioate
  modified_base 20: mod_base = OTHER; note = 2'-O-methyluridine-3'-phosphorothioate
  modified_base 21: mod_base = OTHER; note = 2'-O-methyladenosine
atggatcacaagatggaatta

SEQ ID NO: 1028 - RNA, 21 nt, synthetic construct
  source 1..21: mol_type = other RNA
  modified_base 1: mod_base = OTHER; note = 2'-O-methyluridine-3'-phosphorothioate
  modified_base 2: mod_base = OTHER; note = 2'-O-methyluridine-3'-phosphorothioate
  modified_base 3: mod_base = OTHER; note = 2'-O-methyluridine-3'-phosphate
  modified_base 4: mod_base = OTHER; note = 2'-O-methyladenosine-3'-phosphate
  modified_base 5: mod_base = OTHER; note = 2'-O-methyluridine-3'-phosphate
  modified_base 6: mod_base = OTHER; note = 2'-O-methylcytidine-3'-phosphate
  modified_base 7: mod_base = OTHER; note = 2'-deoxy-2'-fluoroadenosine-3'-phosphate
  modified_base 8: mod_base = OTHER; note = 2'-O-methyladenosine-3'-phosphate
  modified_base 9: mod_base = OTHER; note = 2'-deoxy-2'-fluoroadenosine-3'-phosphate
  modified_base 10: mod_base = OTHER; note = 2'-deoxy-2'-fluorocytidine-3'-phosphate
  modified_base 11: mod_base = OTHER; note = 2'-deoxy-2'-fluorocytidine-3'-phosphate
  modified_base 12: mod_base = OTHER; note = 2'-O-methylcytidine-3'-phosphate
  modified_base 13: mod_base = OTHER; note = 2'-O-methyluridine-3'-phosphate
  modified_base 14: mod_base = OTHER; note = 2'-O-methyladenosine-3'-phosphate
  modified_base 15: mod_base = OTHER; note = 2'-O-methylguanosine-3'-phosphate
  modified_base 16: mod_base = OTHER; note = 2'-O-methylcytidine-3'-phosphate
  modified_base 17: mod_base = OTHER; note = 2'-O-methylcytidine-3'-phosphate
  modified_base 18: mod_base = OTHER; note = 2'-O-methyluridine-3'-phosphate
  modified_base 19: mod_base = OTHER; note = 2'-O-methyluridine-3'-phosphorothioate
  modified_base 20: mod_base = OTHER; note = 2'-O-methylguanosine-3'-phosphorothioate
  modified_base 21: mod_base = OTHER; note = 2'-O-methyladenosine
tttatcaaaccctagccttga

SEQ ID NO: 1029 - RNA, 21 nt, synthetic construct
  source 1..21: mol_type = other RNA
  modified_base 1: mod_base = OTHER; note = 2'-O-methyluridine-3'-phosphorothioate
  modified_base 2: mod_base = OTHER; note = 2'-O-methyladenosine-3'-phosphorothioate
  modified_base 3: mod_base = OTHER; note = 2'-O-methyluridine-3'-phosphate
  modified_base 4: mod_base = OTHER; note = 2'-O-methylcytidine-3'-phosphate
  modified_base 5: mod_base = OTHER; note = 2'-O-methyluridine-3'-phosphate
  modified_base 6: mod_base = OTHER; note = 2'-O-methylguanosine-3'-phosphate
  modified_base 7: mod_base = OTHER; note = 2'-deoxy-2'-fluorouridine-3'-phosphate
  modified_base 8: mod_base = OTHER; note = 2'-O-methyladenosine-3'-phosphate
  modified_base 9: mod_base = OTHER; note = 2'-deoxy-2'-fluoroadenosine-3'-phosphate
  modified_base 10: mod_base = OTHER; note = 2'-deoxy-2'-fluorouridine-3'-phosphate
  modified_base 11: mod_base = OTHER; note = 2'-deoxy-2'-fluoroguanosine-3'-phosphate
  modified_base 12: mod_base = OTHER; note = 2'-O-methylguanosine-3'-phosphate
  modified_base 13: mod_base = OTHER; note = 2'-O-methyluridine-3'-phosphate
  modified_base 14: mod_base = OTHER; note = 2'-O-methyladenosine-3'-phosphate
  modified_base 15: mod_base = OTHER; note = 2'-O-methylcytidine-3'-phosphate
  modified_base 16: mod_base = OTHER; note = 2'-O-methyluridine-3'-phosphate
  modified_base 17: mod_base = OTHER; note = 2'-O-methylguanosine-3'-phosphate
  modified_base 18: mod_base = OTHER; note = 2'-O-methyladenosine-3'-phosphate
  modified_base 19: mod_base = OTHER; note = 2'-O-methylcytidine-3'-phosphorothioate
  modified_base 20: mod_base = OTHER; note = 2'-O-methyluridine-3'-phosphorothioate
  modified_base 21: mod_base = OTHER; note = 2'-O-methyladenosine
tatctgtaatggtactgacta

SEQ ID NO: 1030 - RNA, 21 nt, synthetic construct
  source 1..21: mol_type = other RNA
  modified_base 1: mod_base = OTHER; note = 2'-O-methyluridine-3'-phosphorothioate
  modified_base 2: mod_base = OTHER; note = 2'-O-methyluridine-3'-phosphorothioate
  modified_base 3: mod_base = OTHER; note = 2'-O-methylguanosine-3'-phosphate
  modified_base 4: mod_base = OTHER; note = 2'-O-methylcytidine-3'-phosphate
  modified_base 5: mod_base = OTHER; note = 2'-O-methyluridine-3'-phosphate
  modified_base 6: mod_base = OTHER; note = 2'-O-methyluridine-3'-phosphate
  modified_base 7: mod_base = OTHER; note = 2'-deoxy-2'-fluoroguanosine-3'-phosphate
  modified_base 8: mod_base = OTHER; note = 2'-O-methylcytidine-3'-phosphate
  modified_base 9: mod_base = OTHER; note = 2'-deoxy-2'-fluorouridine-3'-phosphate
  modified_base 10: mod_base = OTHER; note = 2'-deoxy-2'-fluorouridine-3'-phosphate
  modified_base 11: mod_base = OTHER; note = 2'-deoxy-2'-fluorouridine-3'-phosphate
  modified_base 12: mod_base = OTHER; note = 2'-O-methylguanosine-3'-phosphate
  modified_base 13: mod_base = OTHER; note = 2'-O-methyladenosine-3'-phosphate
  modified_base 14: mod_base = OTHER; note = 2'-O-methyladenosine-3'-phosphate
  modified_base 15: mod_base = OTHER; note = 2'-O-methylguanosine-3'-phosphate
  modified_base 16: mod_base = OTHER; note = 2'-O-methyluridine-3'-phosphate
  modified_base 17: mod_base = OTHER; note = 2'-O-methyladenosine-3'-phosphate
  modified_base 18: mod_base = OTHER; note = 2'-O-methylguanosine-3'-phosphate
  modified_base 19: mod_base = OTHER; note = 2'-O-methylcytidine-3'-phosphorothioate
  modified_base 20: mod_base = OTHER; note = 2'-O-methyluridine-3'-phosphorothioate
  modified_base 21: mod_base = OTHER; note = 2'-O-methyladenosine
ttgcttgctttgaagtagcta

SEQ ID NO: 1031 - RNA, 21 nt, synthetic construct
  source 1..21: mol_type = other RNA
  modified_base 1: mod_base = OTHER; note = 2'-O-methyladenosine-3'-phosphorothioate
  modified_base 2: mod_base = OTHER; note = 2'-O-methylguanosine-3'-phosphorothioate
  modified_base 3: mod_base = OTHER; note = 2'-O-methyluridine-3'-phosphate
  modified_base 4: mod_base = OTHER; note = 2'-O-methylguanosine-3'-phosphate
  modified_base 5: mod_base = OTHER; note = 2'-O-methyluridine-3'-phosphate
  modified_base 6: mod_base = OTHER; note = 2'-O-methyluridine-3'-phosphate
  modified_base 7: mod_base = OTHER; note = 2'-deoxy-2'-fluoroadenosine-3'-phosphate
  modified_base 8: mod_base = OTHER; note = 2'-O-methyladenosine-3'-phosphate
  modified_base 9: mod_base = OTHER; note = 2'-deoxy-2'-fluoroguanosine-3'-phosphate
  modified_base 10: mod_base = OTHER; note = 2'-deoxy-2'-fluorouridine-3'-phosphate
  modified_base 11: mod_base = OTHER; note = 2'-deoxy-2'-fluorouridine-3'-phosphate
  modified_base 12: mod_base = OTHER; note = 2'-O-methyladenosine-3'-phosphate
  modified_base 13: mod_base = OTHER; note = 2'-O-methyluridine-3'-phosphate
  modified_base 14: mod_base = OTHER; note = 2'-O-methyladenosine-3'-phosphate
  modified_base 15: mod_base = OTHER; note = 2'-O-methylguanosine-3'-phosphate
  modified_base 16: mod_base = OTHER; note = 2'-O-methyluridine-3'-phosphate
  modified_base 17: mod_base = OTHER; note = 2'-O-methylguanosine-3'-phosphate
  modified_base 18: mod_base = OTHER; note = 2'-O-methyladenosine-3'-phosphate
  modified_base 19: mod_base = OTHER; note = 2'-O-methyladenosine-3'-phosphorothioate
  modified_base 20: mod_base = OTHER; note = 2'-O-methyluridine-3'-phosphorothioate
  modified_base 21: mod_base = OTHER; note = 2'-O-methyladenosine
agtgttaagttatagtgaata

SEQ ID NO: 1032 - RNA, 21 nt, synthetic construct
  source 1..21: mol_type = other RNA
  modified_base 1: mod_base = OTHER; note = 2'-O-methyluridine-3'-phosphorothioate
  modified_base 2: mod_base = OTHER; note = 2'-O-methylguanosine-3'-phosphorothioate
  modified_base 3: mod_base = OTHER; note = 2'-O-methyluridine-3'-phosphate
  modified_base 4: mod_base = OTHER; note = 2'-O-methyluridine-3'-phosphate
  modified_base 5: mod_base = OTHER; note = 2'-O-methyladenosine-3'-phosphate
  modified_base 6: mod_base = OTHER; note = 2'-O-methyladenosine-3'-phosphate
  modified_base 7: mod_base = OTHER; note = 2'-deoxy-2'-fluoroguanosine-3'-phosphate
  modified_base 8: mod_base = OTHER; note = 2'-O-methyluridine-3'-phosphate
  modified_base 9: mod_base = OTHER; note = 2'-deoxy-2'-fluorouridine-3'-phosphate
  modified_base 10: mod_base = OTHER; note = 2'-deoxy-2'-fluoroadenosine-3'-phosphate
  modified_base 11: mod_base = OTHER; note = 2'-deoxy-2'-fluorouridine-3'-phosphate
  modified_base 12: mod_base = OTHER; note = 2'-O-methyladenosine-3'-phosphate
  modified_base 13: mod_base = OTHER; note = 2'-O-methylguanosine-3'-phosphate
  modified_base 14: mod_base = OTHER; note = 2'-O-methyluridine-3'-phosphate
  modified_base 15: mod_base = OTHER; note = 2'-O-methylguanosine-3'-phosphate
  modified_base 16: mod_base = OTHER; note = 2'-O-methyladenosine-3'-phosphate
  modified_base 17: mod_base = OTHER; note = 2'-O-methyladenosine-3'-phosphate
  modified_base 18: mod_base = OTHER; note = 2'-O-methyluridine-3'-phosphate
  modified_base 19: mod_base = OTHER; note = 2'-O-methyladenosine-3'-phosphorothioate
  modified_base 20: mod_base = OTHER; note = 2'-O-methylcytidine-3'-phosphorothioate
  modified_base 21: mod_base = OTHER; note = 2'-O-methyladenosine
tgttaagttatagtgaataca

SEQ ID NO: 1033 - RNA, 21 nt, synthetic construct
  source 1..21: mol_type = other RNA
  modified_base 1: mod_base = OTHER; note = 2'-O-methylguanosine-3'-phosphorothioate
  modified_base 2: mod_base = OTHER; note = 2'-O-methyluridine-3'-phosphorothioate
  modified_base 3: mod_base = OTHER; note = 2'-O-methyladenosine-3'-phosphate
  modified_base 4: mod_base = OTHER; note = 2'-O-methyladenosine-3'-phosphate
  modified_base 5: mod_base = OTHER; note = 2'-O-methyluridine-3'-phosphate
  modified_base 6: mod_base = OTHER; note = 2'-O-methylguanosine-3'-phosphate
  modified_base 7: mod_base = OTHER; note = 2'-deoxy-2'-fluoroguanosine-3'-phosphate
  modified_base 8: mod_base = OTHER; note = 2'-O-methyluridine-3'-phosphate
  modified_base 9: mod_base = OTHER; note = 2'-deoxy-2'-fluoroguanosine-3'-phosphate
  modified_base 10: mod_base = OTHER; note = 2'-deoxy-2'-fluorouridine-3'-phosphate
  modified_base 11: mod_base = OTHER; note = 2'-deoxy-2'-fluoroadenosine-3'-phosphate
  modified_base 12: mod_base = OTHER; note = 2'-O-methylguanosine-3'-phosphate
  modified_base 13: mod_base = OTHER; note = 2'-O-methyladenosine-3'-phosphate
  modified_base 14: mod_base = OTHER; note = 2'-O-methyladenosine-3'-phosphate
  modified_base 15: mod_base = OTHER; note = 2'-O-methylcytidine-3'-phosphate
  modified_base 16: mod_base = OTHER; note = 2'-O-methyladenosine-3'-phosphate
  modified_base 17: mod_base = OTHER; note = 2'-O-methylcytidine-3'-phosphate
  modified_base 18: mod_base = OTHER; note = 2'-O-methyluridine-3'-phosphate
  modified_base 19: mod_base = OTHER; note = 2'-O-methyladenosine-3'-phosphorothioate
  modified_base 20: mod_base = OTHER; note = 2'-O-methyladenosine-3'-phosphorothioate
  modified_base 21: mod_base = OTHER; note = 2'-O-methyladenosine
gtaatggtgtagaacactaaa

SEQ ID NO: 1034 - RNA, 21 nt, synthetic construct
  source 1..21: mol_type = other RNA
  modified_base 1: mod_base = OTHER; note = 2'-O-methyladenosine-3'-phosphorothioate
  modified_base 2: mod_base = OTHER; note = 2'-O-methyladenosine-3'-phosphorothioate
  modified_base 3: mod_base = OTHER; note = 2'-O-methyluridine-3'-phosphate
  modified_base 4: mod_base = OTHER; note = 2'-O-methylguanosine-3'-phosphate
  modified_base 5: mod_base = OTHER; note = 2'-O-methylguanosine-3'-phosphate
  modified_base 6: mod_base = OTHER; note = 2'-O-methyluridine-3'-phosphate
  modified_base 7: mod_base = OTHER; note = 2'-deoxy-2'-fluoroguanosine-3'-phosphate
  modified_base 8: mod_base = OTHER; note = 2'-O-methyluridine-3'-phosphate
  modified_base 9: mod_base = OTHER; note = 2'-deoxy-2'-fluoroadenosine-3'-phosphate
  modified_base 10: mod_base = OTHER; note = 2'-deoxy-2'-fluoroguanosine-3'-phosphate
  modified_base 11: mod_base = OTHER; note = 2'-deoxy-2'-fluoroadenosine-3'-phosphate
  modified_base 12: mod_base = OTHER; note = 2'-O-methyladenosine-3'-phosphate
  modified_base 13: mod_base = OTHER; note = 2'-O-methylcytidine-3'-phosphate
  modified_base 14: mod_base = OTHER; note = 2'-O-methyladenosine-3'-phosphate
  modified_base 15: mod_base = OTHER; note = 2'-O-methylcytidine-3'-phosphate
  modified_base 16: mod_base = OTHER; note = 2'-O-methyluridine-3'-phosphate
  modified_base 17: mod_base = OTHER; note = 2'-O-methyladenosine-3'-phosphate
  modified_base 18: mod_base = OTHER; note = 2'-O-methyladenosine-3'-phosphate
  modified_base 19: mod_base = OTHER; note = 2'-O-methyluridine-3'-phosphorothioate
  modified_base 20: mod_base = OTHER; note = 2'-O-methyluridine-3'-phosphorothioate
  modified_base 21: mod_base = OTHER; note = 2'-O-methyladenosine
aatggtgtagaacactaatta

SEQ ID NO: 1035 - RNA, 21 nt, synthetic construct
  source 1..21: mol_type = other RNA
  modified_base 1: mod_base = OTHER; note = 2'-O-methylcytidine-3'-phosphorothioate
  modified_base 2: mod_base = OTHER; note = 2'-O-methyluridine-3'-phosphorothioate
  modified_base 3: mod_base = OTHER; note = 2'-O-methyladenosine-3'-phosphate
  modified_base 4: mod_base = OTHER; note = 2'-O-methyladenosine-3'-phosphate
  modified_base 5: mod_base = OTHER; note = 2'-O-methyluridine-3'-phosphate
  modified_base 6: mod_base = OTHER; note = 2'-O-methyluridine-3'-phosphate
  modified_base 7: mod_base = OTHER; note = 2'-deoxy-2'-fluorocytidine-3'-phosphate
  modified_base 8: mod_base = OTHER; note = 2'-O-methyladenosine-3'-phosphate
  modified_base 9: mod_base = OTHER; note = 2'-deoxy-2'-fluorouridine-3'-phosphate
  modified_base 10: mod_base = OTHER; note = 2'-deoxy-2'-fluoroadenosine-3'-phosphate
  modified_base 11: mod_base = OTHER; note = 2'-deoxy-2'-fluoroadenosine-3'-phosphate
  modified_base 12: mod_base = OTHER; note = 2'-O-methyluridine-3'-phosphate
  modified_base 13: mod_base = OTHER; note = 2'-O-methylcytidine-3'-phosphate
  modified_base 14: mod_base = OTHER; note = 2'-O-methyladenosine-3'-phosphate
  modified_base 15: mod_base = OTHER; note = 2'-O-methylcytidine-3'-phosphate
  modified_base 16: mod_base = OTHER; note = 2'-O-methyluridine-3'-phosphate
  modified_base 17: mod_base = OTHER; note = 2'-O-methylcytidine-3'-phosphate
  modified_base 18: mod_base = OTHER; note = 2'-O-methyluridine-3'-phosphate
  modified_base 19: mod_base = OTHER; note = 2'-O-methyladenosine-3'-phosphorothioate
  modified_base 20: mod_base = OTHER; note = 2'-O-methyladenosine-3'-phosphorothioate
  modified_base 21: mod_base = OTHER; note = 2'-O-methyladenosine
ctaattcataatcactctaaa

SEQ ID NO: 1036 - RNA, 21 nt, synthetic construct
  source 1..21: mol_type = other RNA
  modified_base 1: mod_base = OTHER; note = 2'-O-methyluridine-3'-phosphorothioate
  modified_base 2: mod_base = OTHER; note = 2'-O-methyluridine-3'-phosphorothioate
  modified_base 3: mod_base = OTHER; note = 2'-O-methyluridine-3'-phosphate
  modified_base 4: mod_base = OTHER; note = 2'-O-methylguanosine-3'-phosphate
  modified_base 5: mod_base = OTHER; note = 2'-O-methylguanosine-3'-phosphate
  modified_base 6: mod_base = OTHER; note = 2'-O-methylguanosine-3'-phosphate
  modified_base 7: mod_base = OTHER; note = 2'-deoxy-2'-fluoroadenosine-3'-phosphate
  modified_base 8: mod_base = OTHER; note = 2'-O-methyluridine-3'-phosphate
  modified_base 9: mod_base = OTHER; note = 2'-deoxy-2'-fluoroadenosine-3'-phosphate
  modified_base 10: mod_base = OTHER; note = 2'-deoxy-2'-fluorouridine-3'-phosphate
  modified_base 11: mod_base = OTHER; note = 2'-deoxy-2'-fluoroguanosine-3'-phosphate
  modified_base 12: mod_base = OTHER; note = 2'-O-methyluridine-3'-phosphate
  modified_base 13: mod_base = OTHER; note = 2'-O-methyladenosine-3'-phosphate
  modified_base 14: mod_base = OTHER; note = 2'-O-methyluridine-3'-phosphate
  modified_base 15: mod_base = OTHER; note = 2'-O-methylguanosine-3'-phosphate
  modified_base 16: mod_base = OTHER; note = 2'-O-methylguanosine-3'-phosphate
  modified_base 17: mod_base = OTHER; note = 2'-O-methylguanosine-3'-phosphate
  modified_base 18: mod_base = OTHER; note = 2'-O-methyluridine-3'-phosphate
  modified_base 19: mod_base = OTHER; note = 2'-O-methyladenosine-3'-phosphorothioate
  modified_base 20: mod_base = OTHER; note = 2'-O-methylguanosine-3'-phosphorothioate
  modified_base 21: mod_base = OTHER; note = 2'-O-methyladenosine
tttgggatatgtatgggtaga

SEQ ID NO: 1037 - RNA, 21 nt, synthetic construct
  source 1..21: mol_type = other RNA
  modified_base 1: mod_base = OTHER; note = 2'-O-methylguanosine-3'-phosphorothioate
  modified_base 2: mod_base = OTHER; note = 2'-O-methylguanosine-3'-phosphorothioate
  modified_base 3: mod_base = OTHER; note = 2'-O-methylguanosine-3'-phosphate
  modified_base 4: mod_base = OTHER; note = 2'-O-methyluridine-3'-phosphate
  modified_base 5: mod_base = OTHER; note = 2'-O-methyladenosine-3'-phosphate
  modified_base 6: mod_base = OTHER; note = 2'-O-methyladenosine-3'-phosphate
  modified_base 7: mod_base = OTHER; note = 2'-deoxy-2'-fluoroadenosine-3'-phosphate
  modified_base 8: mod_base = OTHER; note = 2'-O-methyluridine-3'-phosphate
  modified_base 9: mod_base = OTHER; note = 2'-deoxy-2'-fluorocytidine-3'-phosphate
  modified_base 10: mod_base = OTHER; note = 2'-deoxy-2'-fluoroadenosine-3'-phosphate
  modified_base 11: mod_base = OTHER; note = 2'-deoxy-2'-fluoroguanosine-3'-phosphate
  modified_base 12: mod_base = OTHER; note = 2'-O-methyluridine-3'-phosphate
  modified_base 13: mod_base = OTHER; note = 2'-O-methyladenosine-3'-phosphate
  modified_base 14: mod_base = OTHER; note = 2'-O-methyladenosine-3'-phosphate
  modified_base 15: mod_base = OTHER; note = 2'-O-methylguanosine-3'-phosphate
  modified_base 16: mod_base = OTHER; note = 2'-O-methyladenosine-3'-phosphate
  modified_base 17: mod_base = OTHER; note = 2'-O-methylguanosine-3'-phosphate
  modified_base 18: mod_base = OTHER; note = 2'-O-methylguanosine-3'-phosphate
  modified_base 19: mod_base = OTHER; note = 2'-O-methyluridine-3'-phosphorothioate
  modified_base 20: mod_base = OTHER; note = 2'-O-methylguanosine-3'-phosphorothioate
  modified_base 21: mod_base = OTHER; note = 2'-O-methyladenosine
gggtaaatcagtaagaggtga

SEQ ID NO: 1038 - RNA, 21 nt, synthetic construct
  source 1..21: mol_type = other RNA
  modified_base 1: mod_base = OTHER; note = 2'-O-methylguanosine-3'-phosphorothioate
  modified_base 2: mod_base = OTHER; note = 2'-O-methyluridine-3'-phosphorothioate
  modified_base 3: mod_base = OTHER; note = 2'-O-methyladenosine-3'-phosphate
  modified_base 4: mod_base = OTHER; note = 2'-O-methyladenosine-3'-phosphate
  modified_base 5: mod_base = OTHER; note = 2'-O-methyladenosine-3'-phosphate
  modified_base 6: mod_base = OTHER; note = 2'-O-methyluridine-3'-phosphate
  modified_base 7: mod_base = OTHER; note = 2'-deoxy-2'-fluorocytidine-3'-phosphate
  modified_base 8: mod_base = OTHER; note = 2'-O-methyladenosine-3'-phosphate
  modified_base 9: mod_base = OTHER; note = 2'-deoxy-2'-fluoroguanosine-3'-phosphate
  modified_base 10: mod_base = OTHER; note = 2'-deoxy-2'-fluorouridine-3'-phosphate
  modified_base 11: mod_base = OTHER; note = 2'-deoxy-2'-fluoroadenosine-3'-phosphate
  modified_base 12: mod_base = OTHER; note = 2'-O-methyladenosine-3'-phosphate
  modified_base 13: mod_base = OTHER; note = 2'-O-methylguanosine-3'-phosphate
  modified_base 14: mod_base = OTHER; note = 2'-O-methyladenosine-3'-phosphate
  modified_base 15: mod_base = OTHER; note = 2'-O-methylguanosine-3'-phosphate
  modified_base 16: mod_base = OTHER; note = 2'-O-methylguanosine-3'-phosphate
  modified_base 17: mod_base = OTHER; note = 2'-O-methyluridine-3'-phosphate
  modified_base 18: mod_base = OTHER; note = 2'-O-methylguanosine-3'-phosphate
  modified_base 19: mod_base = OTHER; note = 2'-O-methyluridine-3'-phosphorothioate
  modified_base 20: mod_base = OTHER; note = 2'-O-methyluridine-3'-phosphorothioate
  modified_base 21: mod_base = OTHER; note = 2'-O-methyladenosine
gtaaatcagtaagaggtgtta

SEQ ID NO: 1039 - RNA, 21 nt, synthetic construct
  source 1..21: mol_type = other RNA
  modified_base 1: mod_base = OTHER; note = 2'-O-methyluridine-3'-phosphorothioate
  modified_base 2: mod_base = OTHER; note = 2'-O-methyladenosine-3'-phosphorothioate
  modified_base 3: mod_base = OTHER; note = 2'-O-methyladenosine-3'-phosphate
  modified_base 4: mod_base = OTHER; note = 2'-O-methyladenosine-3'-phosphate
  modified_base 5: mod_base = OTHER; note = 2'-O-methyluridine-3'-phosphate
  modified_base 6: mod_base = OTHER; note = 2'-O-methylcytidine-3'-phosphate
  modified_base 7: mod_base = OTHER; note = 2'-deoxy-2'-fluoroadenosine-3'-phosphate
  modified_base 8: mod_base = OTHER; note = 2'-O-methylguanosine-3'-phosphate
  modified_base 9: mod_base = OTHER; note = 2'-deoxy-2'-fluorouridine-3'-phosphate
  modified_base 10: mod_base = OTHER; note = 2'-deoxy-2'-fluoroadenosine-3'-phosphate
  modified_base 11: mod_base = OTHER; note = 2'-deoxy-2'-fluoroadenosine-3'-phosphate
  modified_base 12: mod_base = OTHER; note = 2'-O-methylguanosine-3'-phosphate
  modified_base 13: mod_base = OTHER; note = 2'-O-methyladenosine-3'-phosphate
  modified_base 14: mod_base = OTHER; note = 2'-O-methylguanosine-3'-phosphate
  modified_base 15: mod_base = OTHER; note = 2'-O-methylguanosine-3'-phosphate
  modified_base 16: mod_base = OTHER; note = 2'-O-methyluridine-3'-phosphate
  modified_base 17: mod_base = OTHER; note = 2'-O-methylguanosine-3'-phosphate
  modified_base 18: mod_base = OTHER; note = 2'-O-methyluridine-3'-phosphate
  modified_base 19: mod_base = OTHER; note = 2'-O-methyluridine-3'-phosphorothioate
  modified_base 20: mod_base = OTHER; note = 2'-O-methyladenosine-3'-phosphorothioate
  modified_base 21: mod_base = OTHER; note = 2'-O-methyladenosine
taaatcagtaagaggtgttaa

SEQ ID NO: 1040 - RNA, 21 nt, synthetic construct
  source 1..21: mol_type = other RNA
  modified_base 1: mod_base = OTHER; note = 2'-O-methyladenosine-3'-phosphorothioate
  modified_base 2: mod_base = OTHER; note = 2'-O-methyladenosine-3'-phosphorothioate
  modified_base 3: mod_base = OTHER; note = 2'-O-methyluridine-3'-phosphate
  modified_base 4: mod_base = OTHER; note = 2'-O-methylcytidine-3'-phosphate
  modified_base 5: mod_base = OTHER; note = 2'-O-methyladenosine-3'-phosphate
  modified_base 6: mod_base = OTHER; note = 2'-O-methylguanosine-3'-phosphate
  modified_base 7: mod_base = OTHER; note = 2'-deoxy-2'-fluorouridine-3'-phosphate
  modified_base 8: mod_base = OTHER; note = 2'-O-methyladenosine-3'-phosphate
  modified_base 9: mod_base = OTHER; note = 2'-deoxy-2'-fluoroadenosine-3'-phosphate
  modified_base 10: mod_base = OTHER; note = 2'-deoxy-2'-fluoroguanosine-3'-phosphate
  modified_base 11: mod_base = OTHER; note = 2'-deoxy-2'-fluoroadenosine-3'-phosphate
  modified_base 12: mod_base = OTHER; note = 2'-O-methylguanosine-3'-phosphate
  modified_base 13: mod_base = OTHER; note = 2'-O-methylguanosine-3'-phosphate
  modified_base 14: mod_base = OTHER; note = 2'-O-methyluridine-3'-phosphate
  modified_base 15: mod_base = OTHER; note = 2'-O-methylguanosine-3'-phosphate
  modified_base 16: mod_base = OTHER; note = 2'-O-methyluridine-3'-phosphate
  modified_base 17: mod_base = OTHER; note = 2'-O-methyluridine-3'-phosphate
  modified_base 18: mod_base = OTHER; note = 2'-O-methyladenosine-3'-phosphate
  modified_base 19: mod_base = OTHER; note = 2'-O-methyluridine-3'-phosphorothioate
  modified_base 20: mod_base = OTHER; note = 2'-O-methyluridine-3'-phosphorothioate
  modified_base 21: mod_base = OTHER; note = 2'-O-methyladenosine
aatcagtaagaggtgttatta

SEQ ID NO: 1041 - DNA, 23 bp, synthetic construct
  source 1..23: mol_type = other DNA
  modified_base 1: mod_base = OTHER; note = 2'-O-methyluridine-3'-phosphate 5'-(E)-Vinylphosphonate
  modified_base 2: mod_base = OTHER; note = 2'-deoxy-2'-fluoroguanosine-3'-phosphate
  modified_base 3: mod_base = OTHER; note = 2'-O-methylguanosine-3'-phosphate
  modified_base 4: mod_base = OTHER; note = 2'-O-methyluridine-3'-phosphate
  modified_base 6: mod_base = OTHER; note = 2'-O-methyluridine-3'-phosphate
  modified_base 7: mod_base = OTHER; note = Adenosine-glycol nucleic acid (GNA), S-isomer
  modified_base 8: mod_base = OTHER; note = 2'-O-methylcytidine-3'-phosphate
  modified_base 9: mod_base = OTHER; note = 2'-O-methyluridine-3'-phosphate
  modified_base 10: mod_base = OTHER; note = 2'-O-methyluridine-3'-phosphate
  modified_base 11: mod_base = OTHER; note = 2'-O-methylcytidine-3'-phosphate
  modified_base 12: mod_base = OTHER; note = 2'-O-methyladenosine-3'-phosphate
  modified_base 13: mod_base = OTHER; note = 2'-O-methyladenosine-3'-phosphate
  modified_base 14: mod_base = OTHER; note = 2'-deoxy-2'-fluoroadenosine-3'-phosphate
  modified_base 15: mod_base = OTHER; note = 2'-O-methyluridine-3'-phosphate
  modified_base 16: mod_base = OTHER; note = 2'-deoxy-2'-fluoroadenosine-3'-phosphate
  modified_base 17: mod_base = OTHER; note = 2'-O-methylcytidine-3'-phosphate
  modified_base 18: mod_base = OTHER; note = 2'-O-methylcytidine-3'-phosphate
  modified_base 19: mod_base = OTHER; note = 2'-O-methylcytidine-3'-phosphate
  modified_base 20: mod_base = OTHER; note = 2'-O-methyluridine-3'-phosphate
  modified_base 21: mod_base = OTHER; note = 2'-O-methylcytidine-3'-phosphorothioate
  modified_base 22: mod_base = OTHER; note = 2'-O-methyladenosine-3'-phosphorothioate
  modified_base 23: mod_base = OTHER; note = 2'-O-methylguanosine
  misc_feature 1..4: note = RNA
  misc_feature 6..23: note = RNA
  misc_feature 5: note = DNA
tggtatacttcaaataccctcag

SEQ ID NO: 1042 - DNA, 23 bp, synthetic construct
  source 1..23: mol_type = other DNA
  modified_base 1: mod_base = OTHER; note = 2'-O-methyluridine-3'-phosphate 5'-(E)-Vinylphosphonate
  modified_base 3: mod_base = OTHER; note = 2'-O-methylguanosine-3'-phosphate
  modified_base 4: mod_base = OTHER; note = 2'-O-methyluridine-3'-phosphate
  modified_base 6: mod_base = OTHER; note = 2'-O-methyluridine-3'-phosphate
  modified_base 8: mod_base = OTHER; note = 2'-O-methylcytidine-3'-phosphate
  modified_base 9: mod_base = OTHER; note = 2'-O-methyluridine-3'-phosphate
  modified_base 10: mod_base = OTHER; note = 2'-O-methyluridine-3'-phosphate
  modified_base 11: mod_base = OTHER; note = 2'-O-methylcytidine-3'-phosphate
  modified_base 13: mod_base = OTHER; note = 2'-O-methyladenosine-3'-phosphate
  modified_base 14: mod_base = OTHER; note = 2'-deoxy-2'-fluoroadenosine-3'-phosphate
  modified_base 15: mod_base = OTHER; note = 2'-O-methyluridine-3'-phosphate
  modified_base 16: mod_base = OTHER; note = 2'-O-methyladenosine-3'-phosphate
  modified_base 17: mod_base = OTHER; note = 2'-O-methylcytidine-3'-phosphate
  modified_base 18: mod_base = OTHER; note = 2'-O-methylcytidine-3'-phosphate
  modified_base 19: mod_base = OTHER; note = 2'-O-methylcytidine-3'-phosphate
  modified_base 20: mod_base = OTHER; note = 2'-O-methyluridine-3'-phosphate
  modified_base 21: mod_base = OTHER; note = 2'-O-methylcytidine-3'-phosphorothioate
  modified_base 22: mod_base = OTHER; note = 2'-O-methyladenosine-3'-phosphorothioate
  modified_base 23: mod_base = OTHER; note = 2'-O-methylguanosine
  misc_feature 1: note = RNA
  misc_feature 3..4: note = RNA
  misc_feature 6: note = RNA
  misc_feature 8..11: note = RNA
  misc_feature 13..23: note = RNA
  misc_feature 2: note = DNA
  misc_feature 5: note = DNA
  misc_feature 7: note = DNA
  misc_feature 12: note = DNA
tggtatacttcaaataccctcag

SEQ ID NO: 1043 - DNA, 23 bp, synthetic construct
  source 1..23: mol_type = other DNA
  modified_base 1: mod_base = OTHER; note = 2'-O-methyluridine-3'-phosphate 5'-(E)-Vinylphosphonate
  modified_base 2: mod_base = OTHER; note = 2'-deoxy-2'-fluoroadenosine-3'-phosphate
  modified_base 3: mod_base = OTHER; note = 2'-O-methyluridine-3'-phosphate
  modified_base 4: mod_base = OTHER; note = 2'-O-methylguanosine-3'-phosphate
  modified_base 6: mod_base = OTHER; note = 2'-O-methyluridine-3'-phosphate
  modified_base 7: mod_base = OTHER; note = Adenosine-glycol nucleic acid (GNA), S-isomer
  modified_base 8: mod_base = OTHER; note = 2'-O-methyluridine-3'-phosphate
  modified_base 9: mod_base = OTHER; note = 2'-O-methyladenosine-3'-phosphate
  modified_base 10: mod_base = OTHER; note = 2'-O-methylcytidine-3'-phosphate
  modified_base 11: mod_base = OTHER; note = 2'-O-methyluridine-3'-phosphate
  modified_base 12: mod_base = OTHER; note = 2'-O-methyluridine-3'-phosphate
  modified_base 13: mod_base = OTHER; note = 2'-O-methylcytidine-3'-phosphate
  modified_base 14: mod_base = OTHER; note = 2'-deoxy-2'-fluoroadenosine-3'-phosphate
  modified_base 15: mod_base = OTHER; note = 2'-O-methyladenosine-3'-phosphate
  modified_base 16: mod_base = OTHER; note = 2'-deoxy-2'-fluoroadenosine-3'-phosphate
  modified_base 17: mod_base = OTHER; note = 2'-O-methyluridine-3'-phosphate
  modified_base 18: mod_base = OTHER; note = 2'-O-methyladenosine-3'-phosphate
  modified_base 19: mod_base = OTHER; note = 2'-O-methylcytidine-3'-phosphate
  modified_base 20: mod_base = OTHER; note = 2'-O-methylcytidine-3'-phosphate
  modified_base 21: mod_base = OTHER; note = 2'-O-methylcytidine-3'-phosphorothioate
  modified_base 22: mod_base = OTHER; note = 2'-O-methyluridine-3'-phosphorothioate
  modified_base 23: mod_base = OTHER; note = 2'-O-methylcytidine
  misc_feature 1..4: note = RNA
  misc_feature 6..23: note = RNA
  misc_feature 5: note = DNA
tatggtatacttcaaataccctc

SEQ ID NO: 1044 - DNA, 23 bp, synthetic construct
  source 1..23: mol_type = other DNA
  modified_base 1: mod_base = OTHER; note = 2'-O-methyluridine-3'-phosphate 5'-(E)-Vinylphosphonate
  modified_base 2: mod_base = OTHER; note = 2'-deoxy-2'-fluorouridine-3'-phosphate
  modified_base 3: mod_base = OTHER; note = 2'-O-methyladenosine-3'-phosphate
  modified_base 4: mod_base = OTHER; note = 2'-O-methyluridine-3'-phosphate
  modified_base 6: mod_base = OTHER; note = 2'-O-methylguanosine-3'-phosphate
  modified_base 7: mod_base = OTHER; note = Thymidine-glycol nucleic acid (GNA), S-Isomer
  modified_base 8: mod_base = OTHER; note = 2'-O-methyladenosine-3'-phosphate
  modified_base 9: mod_base = OTHER; note = 2'-O-methyluridine-3'-phosphate
  modified_base 10: mod_base = OTHER; note = 2'-O-methyladenosine-3'-phosphate
  modified_base 11: mod_base = OTHER; note = 2'-O-methylcytidine-3'-phosphate
  modified_base 12: mod_base = OTHER; note = 2'-O-methyluridine-3'-phosphate
  modified_base 13: mod_base = OTHER; note = 2'-O-methyluridine-3'-phosphate
  modified_base 14: mod_base = OTHER; note = 2'-deoxy-2'-fluorocytidine-3'-phosphate
  modified_base 15: mod_base = OTHER; note = 2'-O-methyladenosine-3'-phosphate
  modified_base 16: mod_base = OTHER; note = 2'-deoxy-2'-fluoroadenosine-3'-phosphate
  modified_base 17: mod_base = OTHER; note = 2'-O-methyladenosine-3'-phosphate
  modified_base 18: mod_base = OTHER; note = 2'-O-methyluridine-3'-phosphate
  modified_base 19: mod_base = OTHER; note = 2'-O-methyladenosine-3'-phosphate
  modified_base 20: mod_base = OTHER; note = 2'-O-methylcytidine-3'-phosphate
  modified_base 21: mod_base = OTHER; note = 2'-O-methylcytidine-3'-phosphorothioate
  modified_base 22: mod_base = OTHER; note = 2'-O-methylcytidine-3'-phosphorothioate
  modified_base 23: mod_base = OTHER; note = 2'-O-methyluridine
  misc_feature 1..4: note = RNA
  misc_feature 6..23: note = RNA
  misc_feature 5: note = DNA
ttatggtatacttcaaataccct

SEQ ID NO: 1045 - DNA, 23 bp, synthetic construct
  source 1..23: mol_type = other DNA
  modified_base 1: mod_base = OTHER; note = 2'-O-methyluridine-3'-phosphate 5'-(E)-Vinylphosphonate
  modified_base 2: mod_base = OTHER; note = 2'-deoxy-2'-fluoroguanosine-3'-phosphate
  modified_base 3: mod_base = OTHER; note = 2'-O-methyluridine-3'-phosphate
  modified_base 4: mod_base = OTHER; note = 2'-O-methyluridine-3'-phosphate
  modified_base 6: mod_base = OTHER; note = 2'-O-methyluridine-3'-phosphate
  modified_base 7: mod_base = OTHER; note = Adenosine-glycol nucleic acid (GNA), S-isomer
  modified_base 8: mod_base = OTHER; note = 2'-O-methyluridine-3'-phosphate
  modified_base 9: mod_base = OTHER; note = 2'-O-methylguanosine-3'-phosphate
  modified_base 10: mod_base = OTHER; note = 2'-O-methylguanosine-3'-phosphate
  modified_base 11: mod_base = OTHER; note = 2'-O-methyluridine-3'-phosphate
  modified_base 12: mod_base = OTHER; note = 2'-O-methyladenosine-3'-phosphate
  modified_base 13: mod_base = OTHER; note = 2'-O-methyluridine-3'-phosphate
  modified_base 14: mod_base = OTHER; note = 2'-deoxy-2'-fluoroadenosine-3'-phosphate
  modified_base 15: mod_base = OTHER; note = 2'-O-methylcytidine-3'-phosphate
  modified_base 16: mod_base = OTHER; note = 2'-deoxy-2'-fluorouridine-3'-phosphate
  modified_base 17: mod_base = OTHER; note = 2'-O-methyluridine-3'-phosphate
  modified_base 18: mod_base = OTHER; note = 2'-O-methylcytidine-3'-phosphate
  modified_base 19: mod_base = OTHER; note = 2'-O-methyladenosine-3'-phosphate
  modified_base 20: mod_base = OTHER; note = 2'-O-methyladenosine-3'-phosphate
  modified_base 21: mod_base = OTHER; note = 2'-O-methyladenosine-3'-phosphorothioate
  modified_base 22: mod_base = OTHER; note = 2'-O-methyluridine-3'-phosphorothioate
  modified_base 23: mod_base = OTHER; note = 2'-O-methyladenosine
  misc_feature 1..4: note = RNA
  misc_feature 6..23: note = RNA
  misc_feature 5: note = DNA
tgttgtatggtatacttcaaata

SEQ ID NO: 1046 - DNA, 23 bp, synthetic construct
  source 1..23: mol_type = other DNA
  modified_base 1: mod_base = OTHER; note = 2'-O-methyluridine-3'-phosphate 5'-(E)-Vinylphosphonate
  modified_base 2: mod_base = OTHER; note = 2'-deoxy-2'-fluoroadenosine-3'-phosphate
  modified_base 3: mod_base = OTHER; note = 2'-O-methylguanosine-3'-phosphate
  modified_base 4: mod_base = OTHER; note = 2'-O-methyluridine-3'-phosphate
  modified_base 6: mod_base = OTHER; note = 2'-O-methylguanosine-3'-phosphate
  modified_base 7: mod_base = OTHER; note = Thymidine-glycol nucleic acid (GNA), S-Isomer
  modified_base 8: mod_base = OTHER; note = 2'-O-methyladenosine-3'-phosphate
  modified_base 9: mod_base = OTHER; note = 2'-O-methyluridine-3'-phosphate
  modified_base 10: mod_base = OTHER; note = 2'-O-methylguanosine-3'-phosphate
  modified_base 11: mod_base = OTHER; note = 2'-O-methylguanosine-3'-phosphate
  modified_base 12: mod_base = OTHER; note = 2'-O-methyluridine-3'-phosphate
  modified_base 13: mod_base = OTHER; note = 2'-O-methyladenosine-3'-phosphate
  modified_base 14: mod_base = OTHER; note = 2'-deoxy-2'-fluorouridine-3'-phosphate
  modified_base 15: mod_base = OTHER; note = 2'-O-methyladenosine-3'-phosphate
  modified_base 16: mod_base = OTHER; note = 2'-deoxy-2'-fluorocytidine-3'-phosphate
  modified_base 17: mod_base = OTHER; note = 2'-O-methyluridine-3'-phosphate
  modified_base 18: mod_base = OTHER; note = 2'-O-methyluridine-3'-phosphate
  modified_base 19: mod_base = OTHER; note = 2'-O-methylcytidine-3'-phosphate
  modified_base 20: mod_base = OTHER; note = 2'-O-methyladenosine-3'-phosphate
  modified_base 21: mod_base = OTHER; note = 2'-O-methyladenosine-3'-phosphorothioate
  modified_base 22: mod_base = OTHER; note = 2'-O-methyladenosine-3'-phosphorothioate
  modified_base 23: mod_base = OTHER; note = 2'-O-methyluridine
  misc_feature 1..4: note = RNA
  misc_feature 6..23: note = RNA
  misc_feature 5: note = DNA
tagttgtatggtatacttcaaat

SEQ ID NO: 1047 - DNA, 23 bp, synthetic construct
  source 1..23: mol_type = other DNA
  modified_base 1: mod_base = OTHER; note = 2'-O-methyluridine-3'-phosphate 5'-(E)-Vinylphosphonate
  modified_base 2: mod_base = OTHER; note = 2'-deoxy-2'-fluoroguanosine-3'-phosphate
  modified_base 3: mod_base = OTHER; note = 2'-O-methylcytidine-3'-phosphate
  modified_base 4: mod_base = OTHER; note = 2'-O-methyluridine-3'-phosphate
  modified_base 6: mod_base = OTHER; note = 2'-O-methylguanosine-3'-phosphate
  modified_base 7: mod_base = OTHER; note = Adenosine-glycol nucleic acid (GNA), S-isomer
  modified_base 8: mod_base = OTHER; note = 2'-O-methylguanosine-3'-phosphate
  modified_base 9: mod_base = OTHER; note = 2'-O-methyluridine-3'-phosphate
  modified_base 10: mod_base = OTHER; note = 2'-O-methyladenosine-3'-phosphate
  modified_base 11: mod_base = OTHER; note = 2'-O-methylguanosine-3'-phosphate
  modified_base 12: mod_base = OTHER; note = 2'-O-methylcytidine-3'-phosphate
  modified_base 13: mod_base = OTHER; note = 2'-O-methylcytidine-3'-phosphate
  modified_base 14: mod_base = OTHER; note = 2'-deoxy-2'-fluoroadenosine-3'-phosphate
  modified_base 15: mod_base = OTHER; note = 2'-O-methyluridine-3'-phosphate
  modified_base 16: mod_base = OTHER; note = 2'-deoxy-2'-fluorouridine-3'-phosphate
  modified_base 17: mod_base = OTHER; note = 2'-O-methylguanosine-3'-phosphate
  modified_base 18: mod_base = OTHER; note = 2'-O-methyluridine-3'-phosphate
  modified_base 19: mod_base = OTHER; note = 2'-O-methylcytidine-3'-phosphate
  modified_base 20: mod_base = OTHER; note = 2'-O-methylcytidine-3'-phosphate
  modified_base 21: mod_base = OTHER; note = 2'-O-methyladenosine-3'-phosphorothioate
  modified_base 22: mod_base = OTHER; note = 2'-O-methylcytidine-3'-phosphorothioate
  modified_base 23: mod_base = OTHER; note = 2'-O-methylguanosine
  misc_feature 1..4: note = RNA
  misc_feature 6..23: note = RNA
  misc_feature 5: note = DNA
tgcttgagtagccattgtccacg

SEQ ID NO: 1048 - DNA, 23 bp, synthetic construct
  source 1..23: mol_type = other DNA
  modified_base 1: mod_base = OTHER; note = 2'-O-methyluridine-3'-phosphate 5'-(E)-Vinylphosphonate
  modified_base 3: mod_base = OTHER; note = 2'-O-methyladenosine-3'-phosphate
  modified_base 4: mod_base = OTHER; note = 2'-O-methylguanosine-3'-phosphate
  modified_base 6: mod_base = OTHER; note = 2'-O-methyluridine-3'-phosphate
  modified_base 8: mod_base = OTHER; note = 2'-O-methylguanosine-3'-phosphate
  modified_base 9: mod_base = OTHER; note = 2'-O-methyladenosine-3'-phosphate
  modified_base 10: mod_base = OTHER; note = 2'-O-methylguanosine-3'-phosphate
  modified_base 11: mod_base = OTHER; note = 2'-O-methyluridine-3'-phosphate
  modified_base 13: mod_base = OTHER; note = 2'-O-methylguanosine-3'-phosphate
  modified_base 14: mod_base = OTHER; note = 2'-deoxy-2'-fluorocytidine-3'-phosphate
  modified_base 15: mod_base = OTHER; note = 2'-O-methylcytidine-3'-phosphate
  modified_base 16: mod_base = OTHER; note = 2'-O-methyladenosine-3'-phosphate
  modified_base 17: mod_base = OTHER; note = 2'-O-methyluridine-3'-phosphate
  modified_base 18: mod_base = OTHER; note = 2'-O-methyluridine-3'-phosphate
  modified_base 19: mod_base = OTHER; note = 2'-O-methylguanosine-3'-phosphate
  modified_base 20: mod_base = OTHER; note = 2'-O-methyluridine-3'-phosphate
  modified_base 21: mod_base = OTHER; note = 2'-O-methylcytidine-3'-phosphorothioate
  modified_base 22: mod_base = OTHER; note = 2'-O-methylcytidine-3'-phosphorothioate
  modified_base 23: mod_base = OTHER; note = 2'-O-methyladenosine
  misc_feature 1: note = RNA
  misc_feature 3..4: note = RNA
  misc_feature 6: note = RNA
  misc_feature 8..11: note = RNA
  misc_feature 13..23: note = RNA
  misc_feature 2: note = DNA
  misc_feature 5: note = DNA
  misc_feature 7: note = DNA
  misc_feature 12: note = DNA
tcagcttgagtagccattgtcca

SEQ ID NO: 1049 - DNA, 23 bp, synthetic construct
  source 1..23: mol_type = other DNA
  modified_base 1: mod_base = OTHER; note = 2'-O-methyluridine-3'-phosphate 5'-(E)-Vinylphosphonate
  modified_base 2: mod_base = OTHER; note = 2'-deoxy-2'-fluorouridine-3'-phosphate
  modified_base 3: mod_base = OTHER; note = 2'-O-methylcytidine-3'-phosphate
  modified_base 4: mod_base = OTHER; note = 2'-O-methyladenosine-3'-phosphate
  modified_base 6: mod_base = OTHER; note = 2'-O-methylcytidine-3'-phosphate
  modified_base 7: mod_base = OTHER; note = Thymidine-glycol nucleic acid (GNA), S-Isomer
  modified_base 8: mod_base = OTHER; note = 2'-O-methyluridine-3'-phosphate
  modified_base 9: mod_base = OTHER; note = 2'-O-methylguanosine-3'-phosphate
  modified_base 10: mod_base = OTHER; note = 2'-O-methyladenosine-3'-phosphate
  modified_base 11: mod_base = OTHER; note = 2'-O-methylguanosine-3'-phosphate
  modified_base 12: mod_base = OTHER; note = 2'-O-methyluridine-3'-phosphate
  modified_base 13: mod_base = OTHER; note = 2'-O-methyladenosine-3'-phosphate
  modified_base 14: mod_base = OTHER; note = 2'-deoxy-2'-fluoroguanosine-3'-phosphate
  modified_base 15: mod_base = OTHER; note = 2'-O-methylcytidine-3'-phosphate
  modified_base 16: mod_base = OTHER; note = 2'-deoxy-2'-fluorocytidine-3'-phosphate
  modified_base 17: mod_base = OTHER; note = 2'-O-methyladenosine-3'-phosphate
  modified_base 18: mod_base = OTHER; note = 2'-O-methyluridine-3'-phosphate
  modified_base 19: mod_base = OTHER; note = 2'-O-methyluridine-3'-phosphate
  modified_base 20: mod_base = OTHER; note = 2'-O-methylguanosine-3'-phosphate
  modified_base 21: mod_base = OTHER; note = 2'-O-methyluridine-3'-phosphorothioate
  modified_base 22: mod_base = OTHER; note = 2'-O-methylcytidine-3'-phosphorothioate
  modified_base 23: mod_base = OTHER; note = 2'-O-methylcytidine
  misc_feature 1..4: note = RNA
  misc_feature 6..23: note = RNA
  misc_feature 5: note = DNA
ttcagcttgagtagccattgtcc

SEQ ID NO: 1050 - DNA, 23 bp, synthetic construct
  source 1..23: mol_type = other DNA
  modified_base 1: mod_base = OTHER; note = 2'-O-methyluridine-3'-phosphate 5'-(E)-Vinylphosphonate
  modified_base 3: mod_base = OTHER; note = 2'-O-methyladenosine-3'-phosphate
  modified_base 4: mod_base = OTHER; note = 2'-O-methyladenosine-3'-phosphate
  modified_base 6: mod_base = OTHER; note = 2'-O-methyluridine-3'-phosphate
  modified_base 8: mod_base = OTHER; note = 2'-O-methylcytidine-3'-phosphate
  modified_base 9: mod_base = OTHER; note = 2'-O-methyladenosine-3'-phosphate
  modified_base 10: mod_base = OTHER; note = 2'-O-methyluridine-3'-phosphate
  modified_base 11: mod_base = OTHER; note = 2'-O-methylcytidine-3'-phosphate
  modified_base 13: mod_base = OTHER; note = 2'-O-methyladenosine-3'-phosphate
  modified_base 14: mod_base = OTHER; note = 2'-deoxy-2'-fluoroadenosine-3'-phosphate
  modified_base 15: mod_base = OTHER; note = 2'-O-methyluridine-3'-phosphate
  modified_base 16: mod_base = OTHER; note = 2'-O-methylcytidine-3'-phosphate
  modified_base 17: mod_base = OTHER; note = 2'-O-methyladenosine-3'-phosphate
  modified_base 18: mod_base = OTHER; note = 2'-O-methylguanosine-3'-phosphate
  modified_base 19: mod_base = OTHER; note = 2'-O-methylcytidine-3'-phosphate
  modified_base 20: mod_base = OTHER; note = 2'-O-methyluridine-3'-phosphate
  modified_base 21: mod_base = OTHER; note = 2'-O-methyluridine-3'-phosphorothioate
  modified_base 22: mod_base = OTHER; note = 2'-O-methylguanosine-3'-phosphorothioate
  modified_base 23: mod_base = OTHER; note = 2'-O-methyladenosine
  misc_feature 1: note = RNA
  misc_feature 3..4: note = RNA
  misc_feature 6: note = RNA
  misc_feature 8..11: note = RNA
  misc_feature 13..23: note = RNA
  misc_feature 2: note = DNA
  misc_feature 5: note = DNA
  misc_feature 7: note = DNA
  misc_feature 12: note = DNA
tcaactccatcaaatcagcttga

SEQ ID NO: 1051 - DNA, 23 bp, synthetic construct
  source 1..23: mol_type = other DNA
  modified_base 1: mod_base = OTHER; note = 2'-O-methyluridine-3'-phosphate 5'-(E)-Vinylphosphonate
  modified_base 3: mod_base = OTHER; note = 2'-O-methylcytidine-3'-phosphate
  modified_base 4: mod_base = OTHER; note = 2'-O-methyladenosine-3'-phosphate
  modified_base 6: mod_base = OTHER; note = 2'-O-methylcytidine-3'-phosphate
  modified_base 8: mod_base = OTHER; note = 2'-O-methylcytidine-3'-phosphate
  modified_base 9: mod_base = OTHER; note = 2'-O-methylcytidine-3'-phosphate
  modified_base 10: mod_base = OTHER; note = 2'-O-methyladenosine-3'-phosphate
  modified_base 11: mod_base = OTHER; note = 2'-O-methyluridine-3'-phosphate
  modified_base 13: mod_base = OTHER; note = 2'-O-methyladenosine-3'-phosphate
  modified_base 14: mod_base = OTHER; note = 2'-deoxy-2'-fluoroadenosine-3'-phosphate
  modified_base 15: mod_base = OTHER; note = 2'-O-methyladenosine-3'-phosphate
  modified_base 16: mod_base = OTHER; note = 2'-O-methyluridine-3'-phosphate
  modified_base 17: mod_base = OTHER; note = 2'-O-methylcytidine-3'-phosphate
  modified_base 18: mod_base = OTHER; note = 2'-O-methyladenosine-3'-phosphate
  modified_base 19: mod_base = OTHER; note = 2'-O-methylguanosine-3'-phosphate
  modified_base 20: mod_base = OTHER; note = 2'-O-methylcytidine-3'-phosphate
  modified_base 21: mod_base = OTHER; note = 2'-O-methyluridine-3'-phosphorothioate
  modified_base 22: mod_base = OTHER; note = 2'-O-methyluridine-3'-phosphorothioate
  modified_base 23: mod_base = OTHER; note = 2'-O-methylguanosine
  misc_feature 1: note = RNA
  misc_feature 3..4: note = RNA
  misc_feature 6: note = RNA
  misc_feature 8..11: note = RNA
  misc_feature 13..23: note = RNA
  misc_feature 2: note = DNA
  misc_feature 5: note = DNA
  misc_feature 7: note = DNA
  misc_feature 12: note = DNA
tccaactccatcaaatcagcttg

SEQ ID NO: 1052 - DNA, 23 bp, synthetic construct
  source 1..23: mol_type = other DNA
  modified_base 1: mod_base = OTHER; note = 2'-O-methyluridine-3'-phosphate 5'-(E)-Vinylphosphonate
  modified_base 3: mod_base = OTHER; note = 2'-O-methylcytidine-3'-phosphate
  modified_base 4: mod_base = OTHER; note = 2'-O-methyluridine-3'-phosphate
  modified_base 6: mod_base = OTHER; note = 2'-O-methyluridine-3'-phosphate
  modified_base 8: mod_base = OTHER; note = 2'-O-methylcytidine-3'-phosphate
  modified_base 9: mod_base = OTHER; note = 2'-O-methylcytidine-3'-phosphate
  modified_base 10: mod_base = OTHER; note = 2'-O-methyladenosine-3'-phosphate
  modified_base 11: mod_base = OTHER; note = 2'-O-methylcytidine-3'-phosphate
  modified_base 13: mod_base = OTHER; note = 2'-O-methylcytidine-3'-phosphate
  modified_base 14: mod_base = OTHER; note = 2'-deoxy-2'-fluoroadenosine-3'-phosphate
  modified_base 15: mod_base = OTHER; note = 2'-O-methylguanosine-3'-phosphate
  modified_base 16: mod_base = OTHER; note = 2'-O-methyladenosine-3'-phosphate
  modified_base 17: mod_base = OTHER; note = 2'-O-methylguanosine-3'-phosphate
  modified_base 18: mod_base = OTHER; note = 2'-O-methyladenosine-3'-phosphate
  modified_base 19: mod_base = OTHER; note = 2'-O-methyladenosine-3'-phosphate
  modified_base 20: mod_base = OTHER; note = 2'-O-methylguanosine-3'-phosphate
  modified_base 21: mod_base = OTHER; note = 2'-O-methylguanosine-3'-phosphorothioate
  modified_base 22: mod_base = OTHER; note = 2'-O-methyladenosine-3'-phosphorothioate
  modified_base 23: mod_base = OTHER; note = 2'-O-methylguanosine
  misc_feature 1: note = RNA
  misc_feature 3..4: note = RNA
  misc_feature 6: note = RNA
  misc_feature 8..11: note = RNA
  misc_feature 13..23: note = RNA
  misc_feature 2: note = DNA
  misc_feature 5: note = DNA
  misc_feature 7: note = DNA
  misc_feature 12: note = DNA
tcctttaccactcagagaaggag

SEQ ID NO: 1053 - DNA, 23 bp, synthetic construct
  source 1..23: mol_type = other DNA
  modified_base 1: mod_base = OTHER; note = 2'-O-methyluridine-3'-phosphate 5'-(E)-Vinylphosphonate
  modified_base 2: mod_base = OTHER; note = 2'-deoxy-2'-fluorouridine-3'-phosphate
  modified_base 3: mod_base = OTHER; note = 2'-O-methylguanosine-3'-phosphate
  modified_base 4: mod_base = OTHER; note = 2'-O-methyluridine-3'-phosphate
  modified_base 6: mod_base = OTHER; note = 2'-O-methylcytidine-3'-phosphate
  modified_base 7: mod_base = OTHER; note = Thymidine-glycol nucleic acid (GNA), S-Isomer
  modified_base 8: mod_base = OTHER; note = 2'-O-methyluridine-3'-phosphate
  modified_base 9: mod_base = OTHER; note = 2'-O-methylguanosine-3'-phosphate
  modified_base 10: mod_base = OTHER; note = 2'-O-methyladenosine-3'-phosphate
  modified_base 11: mod_base = OTHER; note = 2'-O-methylguanosine-3'-phosphate
  modified_base 12: mod_base = OTHER; note = 2'-O-methyluridine-3'-phosphate
  modified_base 13: mod_base = OTHER; note = 2'-O-methylguanosine-3'-phosphate
  modified_base 14: mod_base = OTHER; note = 2'-deoxy-2'-fluoroadenosine-3'-phosphate
  modified_base 15: mod_base = OTHER; note = 2'-O-methyladenosine-3'-phosphate
  modified_base 16: mod_base = OTHER; note = 2'-deoxy-2'-fluoroguanosine-3'-phosphate
  modified_base 17: mod_base = OTHER; note = 2'-O-methylguanosine-3'-phosphate
  modified_base 18: mod_base = OTHER; note = 2'-O-methyladenosine-3'-phosphate
  modified_base 19: mod_base = OTHER; note = 2'-O-methylcytidine-3'-phosphate
  modified_base 20: mod_base = OTHER; note = 2'-O-methyluridine-3'-phosphate
  modified_base 21: mod_base = OTHER; note = 2'-O-methylguanosine-3'-phosphorothioate
  modified_base 22: mod_base = OTHER; note = 2'-O-methyladenosine-3'-phosphorothioate
  modified_base 23: mod_base = OTHER; note = 2'-O-methylguanosine
  misc_feature 1..4: note = RNA
  misc_feature 6..23: note = RNA
  misc_feature 5: note = DNA
ttgttcttgagtgaaggactgag

SEQ ID NO: 1054 - DNA, 23 bp, synthetic construct
  source 1..23: mol_type = other DNA
  modified_base 1: mod_base = OTHER; note = 2'-O-methyluridine-3'-phosphate 5'-(E)-Vinylphosphonate
  modified_base 3: mod_base = OTHER; note = 2'-O-methyluridine-3'-phosphate
  modified_base 4: mod_base = OTHER; note = 2'-O-methyladenosine-3'-phosphate
  modified_base 6: mod_base = OTHER; note = 2'-O-methyluridine-3'-phosphate
  modified_base 8: mod_base = OTHER; note = 2'-O-methylguanosine-3'-phosphate
  modified_base 9: mod_base = OTHER; note = 2'-O-methyluridine-3'-phosphate
  modified_base 10: mod_base = OTHER; note = 2'-O-methyluridine-3'-phosphate
  modified_base 11: mod_base = OTHER; note = 2'-O-methylcytidine-3'-phosphate
  modified_base 13: mod_base = OTHER; note = 2'-O-methyluridine-3'-phosphate
  modified_base 14: mod_base = OTHER; note = 2'-deoxy-2'-fluoroguanosine-3'-phosphate
  modified_base 15: mod_base = OTHER; note = 2'-O-methyladenosine-3'-phosphate
  modified_base 16: mod_base = OTHER; note = 2'-O-methylguanosine-3'-phosphate
  modified_base 17: mod_base = OTHER; note = 2'-O-methyluridine-3'-phosphate
  modified_base 18: mod_base = OTHER; note = 2'-O-methylguanosine-3'-phosphate
  modified_base 19: mod_base = OTHER; note = 2'-O-methyladenosine-3'-phosphate
  modified_base 20: mod_base = OTHER; note = 2'-O-methyladenosine-3'-phosphate
  modified_base 21: mod_base = OTHER; note = 2'-O-methylguanosine-3'-phosphorothioate
  modified_base 22: mod_base = OTHER; note = 2'-O-methylguanosine-3'-phosphorothioate
  modified_base 23: mod_base = OTHER; note = 2'-O-methyladenosine
  misc_feature 1: note = RNA
  misc_feature 3..4: note = RNA
  misc_feature 6: note = RNA
  misc_feature 8..11: note = RNA
  misc_feature 13..23: note = RNA
  misc_feature 2: note = DNA
  misc_feature 5: note = DNA
  misc_feature 7: note = DNA
  misc_feature 12: note = DNA
tctacttgttcttgagtgaagga

SEQ ID NO: 1055 - DNA, 23 bp, synthetic construct
  source 1..23: mol_type = other DNA
  modified_base 1: mod_base = OTHER; note = 2'-O-methyluridine-3'-phosphate 5'-(E)-Vinylphosphonate
  modified_base 3: mod_base = OTHER; note = 2'-O-methyladenosine-3'-phosphate
  modified_base 4: mod_base = OTHER; note = 2'-O-methylguanosine-3'-phosphate
  modified_base 6: mod_base = OTHER; note = 2'-O-methyluridine-3'-phosphate
  modified_base 8: mod_base = OTHER; note = 2'-O-methylcytidine-3'-phosphate
  modified_base 9: mod_base = OTHER; note = 2'-O-methyluridine-3'-phosphate
  modified_base 10: mod_base = OTHER; note = 2'-O-methyluridine-3'-phosphate
  modified_base 11: mod_base = OTHER; note = 2'-O-methylguanosine-3'-phosphate
  modified_base 13: mod_base = OTHER; note = 2'-O-methyluridine-3'-phosphate
  modified_base 14: mod_base = OTHER; note = 2'-deoxy-2'-fluorocytidine-3'-phosphate
  modified_base 15: mod_base = OTHER; note = 2'-O-methyluridine-3'-phosphate
  modified_base 16: mod_base = OTHER; note = 2'-O-methyluridine-3'-phosphate
  modified_base 17: mod_base = OTHER; note = 2'-O-methylguanosine-3'-phosphate
  modified_base 18: mod_base = OTHER; note = 2'-O-methyladenosine-3'-phosphate
  modified_base 19: mod_base = OTHER; note = 2'-O-methylguanosine-3'-phosphate
  modified_base 20: mod_base = OTHER; note = 2'-O-methyluridine-3'-phosphate
  modified_base 21: mod_base = OTHER; note = 2'-O-methylguanosine-3'-phosphorothioate
  modified_base 22: mod_base = OTHER; note = 2'-O-methyladenosine-3'-phosphorothioate
  modified_base 23: mod_base = OTHER; note = 2'-O-methyladenosine
  misc_feature 1: note = RNA
  misc_feature 3..4: note = RNA
  misc_feature 6: note = RNA
  misc_feature 8..11: note = RNA
  misc_feature 13..23: note = RNA
  misc_feature 2: note = DNA
  misc_feature 5: note = DNA
  misc_feature 7: note = DNA
  misc_feature 12: note = DNA
tcagctacttgttcttgagtgaa

SEQ ID NO: 1056 - DNA, 23 bp, synthetic construct
  source 1..23: mol_type = other DNA
  modified_base 1: mod_base = OTHER; note = 2'-O-methyluridine-3'-phosphate 5'-(E)-Vinylphosphonate
  modified_base 2: mod_base = OTHER; note = 2'-deoxy-2'-fluorouridine-3'-phosphate
  modified_base 3: mod_base = OTHER; note = 2'-O-methylguanosine-3'-phosphate
  modified_base 4: mod_base = OTHER; note = 2'-O-methyluridine-3'-phosphate
  modified_base 6: mod_base = OTHER; note = 2'-O-methylcytidine-3'-phosphate
  modified_base 7: mod_base = OTHER; note = Adenosine-glycol nucleic acid (GNA), S-isomer
  modified_base 8: mod_base = OTHER; note = 2'-O-methyluridine-3'-phosphate
  modified_base 9: mod_base = OTHER; note = 2'-O-methylcytidine-3'-phosphate
  modified_base 10: mod_base = OTHER; note = 2'-O-methyladenosine-3'-phosphate
  modified_base 11: mod_base = OTHER; note = 2'-O-methyladenosine-3'-phosphate
  modified_base 12: mod_base = OTHER; note = 2'-O-methyluridine-3'-phosphate
  modified_base 13: mod_base = OTHER; note = 2'-O-methyladenosine-3'-phosphate
  modified_base 14: mod_base = OTHER; note = 2'-deoxy-2'-fluorouridine-3'-phosphate
  modified_base 15: mod_base = OTHER; note = 2'-O-methylcytidine-3'-phosphate
  modified_base 16: mod_base = OTHER; note = 2'-deoxy-2'-fluoroadenosine-3'-phosphate
  modified_base 17: mod_base = OTHER; note = 2'-O-methylguanosine-3'-phosphate
  modified_base 18: mod_base = OTHER; note = 2'-O-methylcytidine-3'-phosphate
  modified_base 19: mod_base = OTHER; note = 2'-O-methyluridine-3'-phosphate
  modified_base 20: mod_base = OTHER; note = 2'-O-methyladenosine-3'-phosphate
  modified_base 21: mod_base = OTHER; note = 2'-O-methylcytidine-3'-phosphorothioate
  modified_base 22: mod_base = OTHER; note = 2'-O-methyluridine-3'-phosphorothioate
  modified_base 23: mod_base = OTHER; note = 2'-O-methyluridine
  misc_feature 1..4: note = RNA
  misc_feature 6..23: note = RNA
  misc_feature 5: note = DNA
ttgtccatcaatatcagctactt

SEQ ID NO: 1057 - DNA, 23 bp, synthetic construct
  source 1..23: mol_type = other DNA
  modified_base 1: mod_base = OTHER; note = 2'-O-methyluridine-3'-phosphate 5'-(E)-Vinylphosphonate
  modified_base 2: mod_base = OTHER; note = 2'-deoxy-2'-fluoroadenosine-3'-phosphate
  modified_base 3: mod_base = OTHER; note = 2'-O-methyluridine-3'-phosphate
  modified_base 4: mod_base = OTHER; note = 2'-O-methyluridine-3'-phosphate
  modified_base 6: mod_base = OTHER; note = 2'-O-methylcytidine-3'-phosphate
  modified_base 7: mod_base = OTHER; note = Adenosine-glycol nucleic acid (GNA), S-isomer
  modified_base 8: mod_base = OTHER; note = 2'-O-methyluridine-3'-phosphate
  modified_base 9: mod_base = OTHER; note = 2'-O-methyladenosine-3'-phosphate
  modified_base 10: mod_base = OTHER; note = 2'-O-methylcytidine-3'-phosphate
  modified_base 11: mod_base = OTHER; note = 2'-O-methyluridine-3'-phosphate
  modified_base 12: mod_base = OTHER; note = 2'-O-methylguanosine-3'-phosphate
  modified_base 13: mod_base = OTHER; note = 2'-O-methyluridine-3'-phosphate
  modified_base 14: mod_base = OTHER; note = 2'-deoxy-2'-fluorocytidine-3'-phosphate
  modified_base 15: mod_base = OTHER; note = 2'-O-methylcytidine-3'-phosphate
  modified_base 16: mod_base = OTHER; note = 2'-deoxy-2'-fluoroadenosine-3'-phosphate
  modified_base 17: mod_base = OTHER; note = 2'-O-methyluridine-3'-phosphate
  modified_base 18: mod_base = OTHER; note = 2'-O-methylcytidine-3'-phosphate
  modified_base 19: mod_base = OTHER; note = 2'-O-methyladenosine-3'-phosphate
  modified_base 20: mod_base = OTHER; note = 2'-O-methyladenosine-3'-phosphate
  modified_base 21: mod_base = OTHER; note = 2'-O-methyluridine-3'-phosphorothioate
  modified_base 22: mod_base = OTHER; note = 2'-O-methyladenosine-3'-phosphorothioate
  modified_base 23: mod_base = OTHER; note = 2'-O-methyluridine
  misc_feature 1..4: note = RNA
  misc_feature 6..23: note = RNA
  misc_feature 5: note = DNA
tattgcatactgtccatcaatat

SEQ ID NO: 1058 - DNA, 23 bp, synthetic construct
  source 1..23: mol_type = other DNA
  modified_base 1: mod_base = OTHER; note = 2'-O-methyluridine-3'-phosphate 5'-(E)-Vinylphosphonate
  modified_base 3: mod_base = OTHER; note = 2'-O-methylguanosine-3'-phosphate
  modified_base 4: mod_base = OTHER; note = 2'-O-methylcytidine-3'-phosphate
  modified_base 6: mod_base = OTHER; note = 2'-O-methylcytidine-3'-phosphate
  modified_base 8: mod_base = OTHER; note = 2'-O-methyladenosine-3'-phosphate
  modified_base 9: mod_base = OTHER; note = 2'-O-methylguanosine-3'-phosphate
  modified_base 10: mod_base = OTHER; note = 2'-O-methyluridine-3'-phosphate
  modified_base 11: mod_base = OTHER; note = 2'-O-methylcytidine-3'-phosphate
  modified_base 13: mod_base = OTHER; note = 2'-O-methyluridine-3'-phosphate
  modified_base 14: mod_base = OTHER; note = 2'-deoxy-2'-fluorouridine-3'-phosphate
  modified_base 15: mod_base = OTHER; note = 2'-O-methylguanosine-3'-phosphate
  modified_base 16: mod_base = OTHER; note = 2'-O-methylcytidine-3'-phosphate
  modified_base 17: mod_base = OTHER; note = 2'-O-methyladenosine-3'-phosphate
  modified_base 18: mod_base = OTHER; note = 2'-O-methyluridine-3'-phosphate
  modified_base 19: mod_base = OTHER; note = 2'-O-methyladenosine-3'-phosphate
  modified_base 20: mod_base = OTHER; note = 2'-O-methylcytidine-3'-phosphate
  modified_base 21: mod_base = OTHER; note = 2'-O-methyluridine-3'-phosphorothioate
  modified_base 22: mod_base = OTHER; note = 2'-O-methylguanosine-3'-phosphorothioate
  modified_base 23: mod_base = OTHER; note = 2'-O-methyluridine
  misc_feature 1: note = RNA
  misc_feature 3..4: note = RNA
  misc_feature 6: note = RNA
  misc_feature 8..11: note = RNA
  misc_feature 13..23: note = RNA
  misc_feature 2: note = DNA
  misc_feature 5: note = DNA
  misc_feature 7: note = DNA
  misc_feature 12: note = DNA
tagctcgagtcattgcatactgt

SEQ ID NO: 1059 - DNA, 23 bp, synthetic construct
  source 1..23: mol_type = other DNA
  modified_base 1: mod_base = OTHER; note = 2'-O-methyluridine-3'-phosphate 5'-(E)-Vinylphosphonate
  modified_base 2: mod_base = OTHER; note = 2'-deoxy-2'-fluoroguanosine-3'-phosphate
  modified_base 3: mod_base = OTHER; note = 2'-O-methylguanosine-3'-phosphate
  modified_base 4: mod_base = OTHER; note = 2'-O-methyladenosine-3'-phosphate
  modified_base 6: mod_base = OTHER; note = 2'-O-methylcytidine-3'-phosphate
  modified_base 7: mod_base = OTHER; note = Adenosine-glycol nucleic acid (GNA), S-isomer
  modified_base 8: mod_base = OTHER; note = 2'-O-methyluridine-3'-phosphate
  modified_base 9: mod_base = OTHER; note = 2'-O-methyladenosine-3'-phosphate
  modified_base 10: mod_base = OTHER; note = 2'-O-methylguanosine-3'-phosphate
  modified_base 11: mod_base = OTHER; note = 2'-O-methylcytidine-3'-phosphate
  modified_base 12: mod_base = OTHER; note = 2'-O-methyladenosine-3'-phosphate
  modified_base 13: mod_base = OTHER; note = 2'-O-methylguanosine-3'-phosphate
  modified_base 14: mod_base = OTHER; note = 2'-deoxy-2'-fluorocytidine-3'-phosphate
  modified_base 15: mod_base = OTHER; note = 2'-O-methyluridine-3'-phosphate
  modified_base 16: mod_base = OTHER; note = 2'-deoxy-2'-fluorocytidine-3'-phosphate
  modified_base 17: mod_base = OTHER; note = 2'-O-methylguanosine-3'-phosphate
  modified_base 18: mod_base = OTHER; note = 2'-O-methyluridine-3'-phosphate
  modified_base 19: mod_base = OTHER; note = 2'-O-methyladenosine-3'-phosphate
  modified_base 20: mod_base = OTHER; note = 2'-O-methylcytidine-3'-phosphate
  modified_base 21: mod_base = OTHER; note = 2'-O-methylcytidine-3'-phosphorothioate
  modified_base 22: mod_base = OTHER; note = 2'-O-methylcytidine-3'-phosphorothioate
  modified_base 23: mod_base = OTHER; note = 2'-O-methyluridine
  misc_feature 1..4: note = RNA
  misc_feature 6..23: note = RNA
  misc_feature 5: note = DNA
tggaacatagcagctcgtaccct

SEQ ID NO: 1060 - DNA, 23 bp, synthetic construct
  source 1..23: mol_type = other DNA
  modified_base 1: mod_base = OTHER; note = 2'-O-methyluridine-3'-phosphate 5'-(E)-Vinylphosphonate
  modified_base 3: mod_base = OTHER; note = 2'-O-methyladenosine-3'-phosphate
  modified_base 4: mod_base = OTHER; note = 2'-O-methylguanosine-3'-phosphate
  modified_base 6: mod_base = OTHER; note = 2'-O-methylguanosine-3'-phosphate
  modified_base 8: mod_base = OTHER; note = 2'-O-methyladenosine-3'-phosphate
  modified_base 9: mod_base = OTHER; note = 2'-O-methylcytidine-3'-phosphate
  modified_base 10: mod_base = OTHER; note = 2'-O-methyladenosine-3'-phosphate
  modified_base 11: mod_base = OTHER; note = 2'-O-methyluridine-3'-phosphate
  modified_base 13: mod_base = OTHER; note = 2'-O-methylguanosine-3'-phosphate
  modified_base 14: mod_base = OTHER; note = 2'-deoxy-2'-fluorocytidine-3'-phosphate
  modified_base 15: mod_base = OTHER; note = 2'-O-methyladenosine-3'-phosphate
  modified_base 16: mod_base = OTHER; note = 2'-O-methylguanosine-3'-phosphate
  modified_base 17: mod_base = OTHER; note = 2'-O-methylcytidine-3'-phosphate
  modified_base 18: mod_base = OTHER; note = 2'-O-methyluridine-3'-phosphate
  modified_base 19: mod_base = OTHER; note = 2'-O-methylcytidine-3'-phosphate
  modified_base 20: mod_base = OTHER; note = 2'-O-methylguanosine-3'-phosphate
  modified_base 21: mod_base = OTHER; note = 2'-O-methyluridine-3'-phosphorothioate
  modified_base 22: mod_base = OTHER; note = 2'-O-methyladenosine-3'-phosphorothioate
  modified_base 23: mod_base = OTHER; note = 2'-O-methylcytidine
  misc_feature 1: note = RNA
  misc_feature 3..4: note = RNA
  misc_feature 6: note = RNA
  misc_feature 8..11: note = RNA
  misc_feature 13..23: note = RNA
  misc_feature 2: note = DNA
  misc_feature 5: note = DNA
  misc_feature 7: note = DNA
  misc_feature 12: note = DNA
tcagggaacatagcagctcgtac

SEQ ID NO: 1061 - DNA, 23 bp, synthetic construct
  source 1..23: mol_type = other DNA
  modified_base 1: mod_base = OTHER; note = 2'-O-methyluridine-3'-phosphate 5'-(E)-Vinylphosphonate
  modified_base 3: mod_base = OTHER; note = 2'-O-methyluridine-3'-phosphate
  modified_base 4: mod_base = OTHER; note = 2'-O-methylcytidine-3'-phosphate
  modified_base 6: mod_base = OTHER; note = 2'-O-methyladenosine-3'-phosphate
  modified_base 8: mod_base = OTHER; note = 2'-O-methyluridine-3'-phosphate
  modified_base 9: mod_base = OTHER; note = 2'-O-methylguanosine-3'-phosphate
  modified_base 10: mod_base = OTHER; note = 2'-O-methyluridine-3'-phosphate
  modified_base 11: mod_base = OTHER; note = 2'-O-methylcytidine-3'-phosphate
  modified_base 13: mod_base = OTHER; note = 2'-O-methylcytidine-3'-phosphate
  modified_base 14: mod_base = OTHER; note = 2'-deoxy-2'-fluoroadenosine-3'-phosphate
  modified_base 15: mod_base = OTHER; note = 2'-O-methylguanosine-3'-phosphate
  modified_base 16: mod_base = OTHER; note = 2'-O-methylguanosine-3'-phosphate
  modified_base 17: mod_base = OTHER; note = 2'-O-methylguanosine-3'-phosphate
  modified_base 18: mod_base = OTHER; note = 2'-O-methyladenosine-3'-phosphate
  modified_base 19: mod_base = OTHER; note = 2'-O-methyladenosine-3'-phosphate
  modified_base 20: mod_base = OTHER; note = 2'-O-methylcytidine-3'-phosphate
  modified_base 21: mod_base = OTHER; note = 2'-O-methyladenosine-3'-phosphorothioate
  modified_base 22: mod_base = OTHER; note = 2'-O-methyluridine-3'-phosphorothioate
  modified_base 23: mod_base = OTHER; note = 2'-O-methyladenosine
  misc_feature 1: note = RNA
  misc_feature 3..4: note = RNA
  misc_feature 6: note = RNA
  misc_feature 8..11: note = RNA
  misc_feature 13..23: note = RNA
  misc_feature 2: note = DNA
  misc_feature 5: note = DNA
  misc_feature 7: note = DNA
  misc_feature 12: note = DNA
tatctaatgtctcagggaacata

SEQ ID NO: 1062 - DNA, 23 bp, synthetic construct
  source 1..23: mol_type = other DNA
  modified_base 1: mod_base = OTHER; note = 2'-O-methyluridine-3'-phosphate 5'-(E)-Vinylphosphonate
  modified_base 2: mod_base = OTHER; note = 2'-deoxy-2'-fluorouridine-3'-phosphate
  modified_base 3: mod_base = OTHER; note = 2'-O-methylcytidine-3'-phosphate
  modified_base 4: mod_base = OTHER; note = 2'-O-methyladenosine-3'-phosphate
  modified_base 6: mod_base = OTHER; note = 2'-O-methylcytidine-3'-phosphate
  modified_base 7: mod_base = OTHER; note = Thymidine-glycol nucleic acid (GNA), S-Isomer
  modified_base 8: mod_base = OTHER; note = 2'-O-methyladenosine-3'-phosphate
  modified_base 9: mod_base = OTHER; note = 2'-O-methyladenosine-3'-phosphate
  modified_base 10: mod_base = OTHER; note = 2'-O-methyluridine-3'-phosphate
  modified_base 11: mod_base = OTHER; note = 2'-O-methylguanosine-3'-phosphate
  modified_base 12: mod_base = OTHER; note = 2'-O-methyluridine-3'-phosphate
  modified_base 13: mod_base = OTHER; note = 2'-O-methylcytidine-3'-phosphate
  modified_base 14: mod_base = OTHER; note = 2'-deoxy-2'-fluorouridine-3'-phosphate
  modified_base 15: mod_base = OTHER; note = 2'-O-methylcytidine-3'-phosphate
  modified_base 16: mod_base = OTHER; note = 2'-deoxy-2'-fluoroadenosine-3'-phosphate
  modified_base 17: mod_base = OTHER; note = 2'-O-methylguanosine-3'-phosphate
  modified_base 18: mod_base = OTHER; note = 2'-O-methylguanosine-3'-phosphate
  modified_base 19: mod_base = OTHER; note = 2'-O-methylguanosine-3'-phosphate
  modified_base 20: mod_base = OTHER; note = 2'-O-methyladenosine-3'-phosphate
  modified_base 21: mod_base = OTHER; note = 2'-O-methyladenosine-3'-phosphorothioate
  modified_base 22: mod_base = OTHER; note = 2'-O-methylcytidine-3'-phosphorothioate
  modified_base 23: mod_base = OTHER; note = 2'-O-methyladenosine
  misc_feature 1..4: note = RNA
  misc_feature 6..23: note = RNA
  misc_feature 5: note = DNA
ttcatctaatgtctcagggaaca

SEQ ID NO: 1063 - DNA, 23 bp, synthetic construct
  source 1..23: mol_type = other DNA
  modified_base 1: mod_base = OTHER; note = 2'-O-methyluridine-3'-phosphate 5'-(E)-Vinylphosphonate
  modified_base 2: mod_base = OTHER; note = 2'-deoxy-2'-fluoroguanosine-3'-phosphate
  modified_base 3: mod_base = OTHER; note = 2'-O-methylguanosine-3'-phosphate
  modified_base 4: mod_base = OTHER; note = 2'-O-methyladenosine-3'-phosphate
  modified_base 6: mod_base = OTHER; note = 2'-O-methylcytidine-3'-phosphate
  modified_base 7: mod_base = OTHER; note = Thymidine-glycol nucleic acid (GNA), S-Isomer
  modified_base 8: mod_base = OTHER; note = 2'-O-methylguanosine-3'-phosphate
  modified_base 9: mod_base = OTHER; note = 2'-O-methylcytidine-3'-phosphate
  modified_base 10: mod_base = OTHER; note = 2'-O-methyladenosine-3'-phosphate
  modified_base 11: mod_base = OTHER; note = 2'-O-methyluridine-3'-phosphate
  modified_base 12: mod_base = OTHER; note = 2'-O-methylguanosine-3'-phosphate
  modified_base 13: mod_base = OTHER; note = 2'-O-methylcytidine-3'-phosphate
  modified_base 14: mod_base = OTHER; note = 2'-deoxy-2'-fluorocytidine-3'-phosphate
  modified_base 15: mod_base = OTHER; note = 2'-O-methylcytidine-3'-phosphate
  modified_base 16: mod_base = OTHER; note = 2'-deoxy-2'-fluorouridine-3'-phosphate
  modified_base 17: mod_base = OTHER; note = 2'-O-methylcytidine-3'-phosphate
  modified_base 18: mod_base = OTHER; note = 2'-O-methyladenosine-3'-phosphate
  modified_base 19: mod_base = OTHER; note = 2'-O-methyluridine-3'-phosphate
  modified_base 20: mod_base = OTHER; note = 2'-O-methylcytidine-3'-phosphate
  modified_base 21: mod_base = OTHER; note = 2'-O-methyluridine-3'-phosphorothioate
  modified_base 22: mod_base = OTHER; note = 2'-O-methyladenosine-3'-phosphorothioate
  modified_base 23: mod_base = OTHER; note = 2'-O-methyladenosine
  misc_feature 1..4: note = RNA
  misc_feature 6..23: note = RNA
  misc_feature 5: note = DNA
tggatctgcatgccctcatctaa

SEQ ID NO: 1064 - DNA, 23 bp, synthetic construct
  source 1..23: mol_type = other DNA
  modified_base 1: mod_base = OTHER; note = 2'-O-methyluridine-3'-phosphate 5'-(E)-Vinylphosphonate
  modified_base 3: mod_base = OTHER; note = 2'-O-methyladenosine-3'-phosphate
  modified_base 4: mod_base = OTHER; note = 2'-O-methylcytidine-3'-phosphate
  modified_base 6: mod_base = OTHER; note = 2'-O-methyluridine-3'-phosphate
  modified_base 8: mod_base = OTHER; note = 2'-O-methyladenosine-3'-phosphate
  modified_base 9: mod_base = OTHER; note = 2'-O-methylguanosine-3'-phosphate
  modified_base 10: mod_base = OTHER; note = 2'-O-methyluridine-3'-phosphate
  modified_base 11: mod_base = OTHER; note = 2'-O-methylguanosine-3'-phosphate
  modified_base 13: mod_base = OTHER; note = 2'-O-methylguanosine-3'-phosphate
  modified_base 14: mod_base = OTHER; note = 2'-deoxy-2'-fluoroadenosine-3'-phosphate
  modified_base 15: mod_base = OTHER; note = 2'-O-methyluridine-3'-phosphate
  modified_base 16: mod_base = OTHER; note = 2'-O-methylguanosine-3'-phosphate
  modified_base 17: mod_base = OTHER; note = 2'-O-methyladenosine-3'-phosphate
  modified_base 18: mod_base = OTHER; note = 2'-O-methylguanosine-3'-phosphate
  modified_base 19: mod_base = OTHER; note = 2'-O-methylcytidine-3'-phosphate
  modified_base 20: mod_base = OTHER; note = 2'-O-methyladenosine-3'-phosphate
  modified_base 21: mod_base = OTHER; note = 2'-O-methylguanosine-3'-phosphorothioate
  modified_base 22: mod_base = OTHER; note = 2'-O-methylcytidine-3'-phosphorothioate
  modified_base 23: mod_base = OTHER; note = 2'-O-methyladenosine
  misc_feature 1: note = RNA
  misc_feature 3..4: note = RNA
  misc_feature 6: note = RNA
  misc_feature 8..11: note = RNA
  misc_feature 13..23: note = RNA
  misc_feature 2: note = DNA
  misc_feature 5: note = DNA
  misc_feature 7: note = DNA
  misc_feature 12: note = DNA
tgacattagtgggatgagcagca

SEQ ID NO: 1065 - DNA, 23 bp, synthetic construct
  source 1..23: mol_type = other DNA
  modified_base 1: mod_base = OTHER; note = 2'-O-methyluridine-3'-phosphate 5'-(E)-Vinylphosphonate
  modified_base 2: mod_base = OTHER; note = 2'-deoxy-2'-fluoroguanosine-3'-phosphate
  modified_base 3: mod_base = OTHER; note = 2'-O-methyluridine-3'-phosphate
  modified_base 4: mod_base = OTHER; note = 2'-O-methyluridine-3'-phosphate
  modified_base 6: mod_base = OTHER; note = 2'-O-methylcytidine-3'-phosphate
  modified_base 7: mod_base = OTHER; note = Adenosine-glycol nucleic acid (GNA), S-isomer
  modified_base 8: mod_base = OTHER; note = 2'-O-methylguanosine-3'-phosphate
  modified_base 9: mod_base = OTHER; note = 2'-O-methylcytidine-3'-phosphate
  modified_base 10: mod_base = OTHER; note = 2'-O-methyladenosine-3'-phosphate
  modified_base 11: mod_base = OTHER; note = 2'-O-methyluridine-3'-phosphate
  modified_base 12: mod_base = OTHER; note = 2'-O-methylcytidine-3'-phosphate
  modified_base 13: mod_base = OTHER; note = 2'-O-methyluridine-3'-phosphate
  modified_base 14: mod_base = OTHER; note = 2'-deoxy-2'-fluoroguanosine-3'-phosphate
  modified_base 15: mod_base = OTHER; note = 2'-O-methyluridine-3'-phosphate
  modified_base 16: mod_base = OTHER; note = 2'-deoxy-2'-fluoroguanosine-3'-phosphate
  modified_base 17: mod_base = OTHER; note = 2'-O-methyladenosine-3'-phosphate
  modified_base 18: mod_base = OTHER; note = 2'-O-methyluridine-3'-phosphate
  modified_base 19: mod_base = OTHER; note = 2'-O-methylguanosine-3'-phosphate
  modified_base 20: mod_base = OTHER; note = 2'-O-methylguanosine-3'-phosphate
  modified_base 21: mod_base = OTHER; note = 2'-O-methyluridine-3'-phosphorothioate
  modified_base 22: mod_base = OTHER; note = 2'-O-methyluridine-3'-phosphorothioate
  modified_base 23: mod_base = OTHER; note = 2'-O-methylcytidine
  misc_feature 1..4: note = RNA
  misc_feature 6..23: note = RNA
  misc_feature 5: note = DNA
tgtttcagcatctgtgatggttc

SEQ ID NO: 1066 - DNA, 23 bp, synthetic construct
  source 1..23: mol_type = other DNA
  modified_base 1: mod_base = OTHER; note = 2'-O-methyluridine-3'-phosphate 5'-(E)-Vinylphosphonate
  modified_base 2: mod_base = OTHER; note = 2'-deoxy-2'-fluoroadenosine-3'-phosphate
  modified_base 3: mod_base = OTHER; note = 2'-O-methyluridine-3'-phosphate
  modified_base 4: mod_base = OTHER; note = 2'-O-methylguanosine-3'-phosphate
  modified_base 6: mod_base = OTHER; note = 2'-O-methyluridine-3'-phosphate
  modified_base 7: mod_base = OTHER; note = Thymidine-glycol nucleic acid (GNA), S-Isomer
  modified_base 8: mod_base = OTHER; note = 2'-O-methylcytidine-3'-phosphate
  modified_base 9: mod_base = OTHER; note = 2'-O-methyladenosine-3'-phosphate
  modified_base 10: mod_base = OTHER; note = 2'-O-methylguanosine-3'-phosphate
  modified_base 11: mod_base = OTHER; note = 2'-O-methylcytidine-3'-phosphate
  modified_base 12: mod_base = OTHER; note = 2'-O-methyladenosine-3'-phosphate
  modified_base 13: mod_base = OTHER; note = 2'-O-methyluridine-3'-phosphate
  modified_base 14: mod_base = OTHER; note = 2'-deoxy-2'-fluorocytidine-3'-phosphate
  modified_base 15: mod_base = OTHER; note = 2'-O-methyluridine-3'-phosphate
  modified_base 16: mod_base = OTHER; note = 2'-deoxy-2'-fluoroguanosine-3'-phosphate
  modified_base 17: mod_base = OTHER; note = 2'-O-methyluridine-3'-phosphate
  modified_base 18: mod_base = OTHER; note = 2'-O-methylguanosine-3'-phosphate
  modified_base 19: mod_base = OTHER; note = 2'-O-methyladenosine-3'-phosphate
  modified_base 20: mod_base = OTHER; note = 2'-O-methyluridine-3'-phosphate
  modified_base 21: mod_base = OTHER; note = 2'-O-methylguanosine-3'-phosphorothioate
  modified_base 22: mod_base = OTHER; note = 2'-O-methylguanosine-3'-phosphorothioate
  modified_base 23: mod_base = OTHER; note = 2'-O-methyluridine
  misc_feature 1..4: note = RNA
  misc_feature 6..23: note = RNA
  misc_feature 5: note = DNA
tatgtttcagcatctgtgatggt

SEQ ID NO: 1067 - DNA, 23 bp, synthetic construct
  source 1..23: mol_type = other DNA
  modified_base 1: mod_base = OTHER; note = 2'-O-methyluridine-3'-phosphate 5'-(E)-Vinylphosphonate
  modified_base 3: mod_base = OTHER; note = 2'-O-methyluridine-3'-phosphate
  modified_base 4: mod_base = OTHER; note = 2'-O-methylguanosine-3'-phosphate
  modified_base 6: mod_base = OTHER; note = 2'-O-methyluridine-3'-phosphate
  modified_base 8: mod_base = OTHER; note = 2'-O-methylcytidine-3'-phosphate
  modified_base 9: mod_base = OTHER; note = 2'-O-methyladenosine-3'-phosphate
  modified_base 10: mod_base = OTHER; note = 2'-O-methylguanosine-3'-phosphate
  modified_base 11: mod_base = OTHER; note = 2'-O-methylcytidine-3'-phosphate
  modified_base 13: mod_base = OTHER; note = 2'-O-methyluridine-3'-phosphate
  modified_base 14: mod_base = OTHER; note = 2'-deoxy-2'-fluorocytidine-3'-phosphate
  modified_base 15: mod_base = OTHER; note = 2'-O-methyluridine-3'-phosphate
  modified_base 16: mod_base = OTHER; note = 2'-O-methylguanosine-3'-phosphate
  modified_base 17: mod_base = OTHER; note = 2'-O-methyluridine-3'-phosphate
  modified_base 18: mod_base = OTHER; note = 2'-O-methylguanosine-3'-phosphate
  modified_base 19: mod_base = OTHER; note = 2'-O-methyladenosine-3'-phosphate
  modified_base 20: mod_base = OTHER; note = 2'-O-methyluridine-3'-phosphate
  modified_base 21: mod_base = OTHER; note = 2'-O-methylguanosine-3'-phosphorothioate
  modified_base 22: mod_base = OTHER; note = 2'-O-methylguanosine-3'-phosphorothioate
  modified_base 23: mod_base = OTHER; note = 2'-O-methyluridine
  misc_feature 1: note = RNA
  misc_feature 3..4: note = RNA
  misc_feature 6: note = RNA
  misc_feature 8..11: note = RNA
  misc_feature 13..23: note = RNA
  misc_feature 2: note = DNA
  misc_feature 5: note = DNA
  misc_feature 7: note = DNA
  misc_feature 12: note = DNA
tatgtttcagcatctgtgatggt

SEQ ID NO: 1068 - DNA, 23 bp, synthetic construct
  source 1..23: mol_type = other DNA
  modified_base 1: mod_base = OTHER; note = 2'-O-methyluridine-3'-phosphate 5'-(E)-Vinylphosphonate
  modified_base 2: mod_base = OTHER; note = 2'-deoxy-2'-fluoroadenosine-3'-phosphate
  modified_base 3: mod_base = OTHER; note = 2'-O-methylcytidine-3'-phosphate
  modified_base 4: mod_base = OTHER; note = 2'-O-methyladenosine-3'-phosphate
  modified_base 6: mod_base = OTHER; note = 2'-O-methylcytidine-3'-phosphate
  modified_base 7: mod_base = OTHER; note = Thymidine-glycol nucleic acid (GNA), S-Isomer
  modified_base 8: mod_base = OTHER; note = 2'-O-methylguanosine-3'-phosphate
  modified_base 9: mod_base = OTHER; note = 2'-O-methylcytidine-3'-phosphate
  modified_base 10: mod_base = OTHER; note = 2'-O-methyladenosine-3'-phosphate
  modified_base 11: mod_base = OTHER; note = 2'-O-methyluridine-3'-phosphate
  modified_base 12: mod_base = OTHER; note = 2'-O-methylguanosine-3'-phosphate
  modified_base 13: mod_base = OTHER; note = 2'-O-methyluridine-3'-phosphate
  modified_base 14: mod_base = OTHER; note = 2'-deoxy-2'-fluorouridine-3'-phosphate
  modified_base 15: mod_base = OTHER; note = 2'-O-methyluridine-3'-phosphate
  modified_base 16: mod_base = OTHER; note = 2'-deoxy-2'-fluorocytidine-3'-phosphate
  modified_base 17: mod_base = OTHER; note = 2'-O-methyladenosine-3'-phosphate
  modified_base 18: mod_base = OTHER; note = 2'-O-methylguanosine-3'-phosphate
  modified_base 19: mod_base = OTHER; note = 2'-O-methylcytidine-3'-phosphate
  modified_base 20: mod_base = OTHER; note = 2'-O-methyladenosine-3'-phosphate
  modified_base 21: mod_base = OTHER; note = 2'-O-methyluridine-3'-phosphorothioate
  modified_base 22: mod_base = OTHER; note = 2'-O-methylcytidine-3'-phosphorothioate
  modified_base 23: mod_base = OTHER; note = 2'-O-methyluridine
  misc_feature 1..4: note = RNA
  misc_feature 6..23: note = RNA
  misc_feature 5: note = DNA
tacaactgcatgtttcagcatct

SEQ ID NO: 1069 - DNA, 23 bp, synthetic construct
  source 1..23: mol_type = other DNA
  modified_base 1: mod_base = OTHER; note = 2'-O-methyluridine-3'-phosphate 5'-(E)-Vinylphosphonate
  modified_base 3: mod_base = OTHER; note = 2'-O-methylcytidine-3'-phosphate
  modified_base 4: mod_base = OTHER; note = 2'-O-methyladenosine-3'-phosphate
  modified_base 6: mod_base = OTHER; note = 2'-O-methylcytidine-3'-phosphate
  modified_base 8: mod_base = OTHER; note = 2'-O-methylguanosine-3'-phosphate
  modified_base 9: mod_base = OTHER; note = 2'-O-methylcytidine-3'-phosphate
  modified_base 10: mod_base = OTHER; note = 2'-O-methyladenosine-3'-phosphate
  modified_base 11: mod_base = OTHER; note = 2'-O-methyluridine-3'-phosphate
  modified_base 13: mod_base = OTHER; note = 2'-O-methyluridine-3'-phosphate
  modified_base 14: mod_base = OTHER; note = 2'-deoxy-2'-fluorouridine-3'-phosphate
  modified_base 15: mod_base = OTHER; note = 2'-O-methyluridine-3'-phosphate
  modified_base 16: mod_base = OTHER; note = 2'-O-methylcytidine-3'-phosphate
  modified_base 17: mod_base = OTHER; note = 2'-O-methyladenosine-3'-phosphate
  modified_base 18: mod_base = OTHER; note = 2'-O-methylguanosine-3'-phosphate
  modified_base 19: mod_base = OTHER; note = 2'-O-methylcytidine-3'-phosphate
  modified_base 20: mod_base = OTHER; note = 2'-O-methyladenosine-3'-phosphate
  modified_base 21: mod_base = OTHER; note = 2'-O-methyluridine-3'-phosphorothioate
  modified_base 22: mod_base = OTHER; note = 2'-O-methylcytidine-3'-phosphorothioate
  modified_base 23: mod_base = OTHER; note = 2'-O-methyluridine
  misc_feature 1: note = RNA
  misc_feature 3..4: note = RNA
  misc_feature 6: note = RNA
  misc_feature 8..11: note = RNA
  misc_feature 13..23: note = RNA
  misc_feature 2: note = DNA
  misc_feature 5: note = DNA
  misc_feature 7: note = DNA
  misc_feature 12: note = DNA
tacaactgcatgtttcagcatct

SEQ ID NO: 1070 - DNA, 23 bp, synthetic construct
  source 1..23: mol_type = other DNA
  modified_base 1: mod_base = OTHER; note = 2'-O-methyluridine-3'-phosphate 5'-(E)-Vinylphosphonate
  modified_base 2: mod_base = OTHER; note = 2'-deoxy-2'-fluorouridine-3'-phosphate
  modified_base 3: mod_base = OTHER; note = 2'-O-methylcytidine-3'-phosphate
  modified_base 4: mod_base = OTHER; note = 2'-O-methyladenosine-3'-phosphate
  modified_base 6: mod_base = OTHER; note = 2'-O-methylguanosine-3'-phosphate
  modified_base 7: mod_base = OTHER; note = Thymidine-glycol nucleic acid (GNA), S-Isomer
  modified_base 8: mod_base = OTHER; note = 2'-O-methyluridine-3'-phosphate
  modified_base 9: mod_base = OTHER; note = 2'-O-methyluridine-3'-phosphate
  modified_base 10: mod_base = OTHER; note = 2'-O-methyladenosine-3'-phosphate
  modified_base 11: mod_base = OTHER; note = 2'-O-methylcytidine-3'-phosphate
  modified_base 12: mod_base = OTHER; note = 2'-O-methyladenosine-3'-phosphate
  modified_base 13: mod_base = OTHER; note = 2'-O-methyladenosine-3'-phosphate
  modified_base 14: mod_base = OTHER; note = 2'-deoxy-2'-fluorocytidine-3'-phosphate
  modified_base 15: mod_base = OTHER; note = 2'-O-methyluridine-3'-phosphate
  modified_base 16: mod_base = OTHER; note = 2'-deoxy-2'-fluoroguanosine-3'-phosphate
  modified_base 17: mod_base = OTHER; note = 2'-O-methylcytidine-3'-phosphate
  modified_base 18: mod_base = OTHER; note = 2'-O-methyladenosine-3'-phosphate
  modified_base 19: mod_base = OTHER; note = 2'-O-methyluridine-3'-phosphate
  modified_base 20: mod_base = OTHER; note = 2'-O-methylguanosine-3'-phosphate
  modified_base 21: mod_base = OTHER; note = 2'-O-methyluridine-3'-phosphorothioate
  modified_base 22: mod_base = OTHER; note = 2'-O-methyluridine-3'-phosphorothioate
  modified_base 23: mod_base = OTHER; note = 2'-O-methyluridine
  misc_feature 1..4: note = RNA
  misc_feature 6..23: note = RNA
  misc_feature 5: note = DNA
ttcaagtttacaactgcatgttt

SEQ ID NO: 1071 - DNA, 23 bp, synthetic construct
  source 1..23: mol_type = other DNA
  modified_base 1: mod_base = OTHER; note = 2'-O-methyluridine-3'-phosphate 5'-(E)-Vinylphosphonate
  modified_base 2: mod_base = OTHER; note = 2'-deoxy-2'-fluoroadenosine-3'-phosphate
  modified_base 3: mod_base = OTHER; note = 2'-O-methyladenosine-3'-phosphate
  modified_base 4: mod_base = OTHER; note = 2'-O-methyluridine-3'-phosphate
  modified_base 6: mod_base = OTHER; note = 2'-O-methyladenosine-3'-phosphate
  modified_base 7: mod_base = OTHER; note = Adenosine-glycol nucleic acid (GNA), S-isomer
  modified_base 8: mod_base = OTHER; note = 2'-O-methylguanosine-3'-phosphate
  modified_base 9: mod_base = OTHER; note = 2'-O-methyluridine-3'-phosphate
  modified_base 10: mod_base = OTHER; note = 2'-O-methyluridine-3'-phosphate
  modified_base 11: mod_base = OTHER; note = 2'-O-methyluridine-3'-phosphate
  modified_base 12: mod_base = OTHER; note = 2'-O-methyladenosine-3'-phosphate
  modified_base 13: mod_base = OTHER; note = 2'-O-methylcytidine-3'-phosphate
  modified_base 14: mod_base = OTHER; note = 2'-deoxy-2'-fluoroadenosine-3'-phosphate
  modified_base 15: mod_base = OTHER; note = 2'-O-methyladenosine-3'-phosphate
  modified_base 16: mod_base = OTHER; note = 2'-deoxy-2'-fluorocytidine-3'-phosphate
  modified_base 17: mod_base = OTHER; note = 2'-O-methyluridine-3'-phosphate
  modified_base 18: mod_base = OTHER; note = 2'-O-methylguanosine-3'-phosphate
  modified_base 19: mod_base = OTHER; note = 2'-O-methylcytidine-3'-phosphate
  modified_base 20: mod_base = OTHER; note = 2'-O-methyladenosine-3'-phosphate
  modified_base 21: mod_base = OTHER; note = 2'-O-methyluridine-3'-phosphorothioate
  modified_base 22: mod_base = OTHER; note = 2'-O-methylguanosine-3'-phosphorothioate
  modified_base 23: mod_base = OTHER; note = 2'-O-methyluridine
  misc_feature 1..4: note = RNA
  misc_feature 6..23: note = RNA
  misc_feature 5: note = DNA
taatcaagtttacaactgcatgt

SEQ ID NO: 1072 - DNA, 23 bp, synthetic construct
  source 1..23: mol_type = other DNA
  modified_base 1: mod_base = OTHER; note = 2'-O-methyluridine-3'-phosphate 5'-(E)-Vinylphosphonate
  modified_base 3: mod_base = OTHER; note = 2'-O-methyladenosine-3'-phosphate
  modified_base 4: mod_base = OTHER; note = 2'-O-methyluridine-3'-phosphate
  modified_base 6: mod_base = OTHER; note = 2'-O-methyladenosine-3'-phosphate
  modified_base 8: mod_base = OTHER; note = 2'-O-methylguanosine-3'-phosphate
  modified_base 9: mod_base = OTHER; note = 2'-O-methyluridine-3'-phosphate
  modified_base 10: mod_base = OTHER; note = 2'-O-methyluridine-3'-phosphate
  modified_base 11: mod_base = OTHER; note = 2'-O-methyluridine-3'-phosphate
  modified_base 13: mod_base = OTHER; note = 2'-O-methylcytidine-3'-phosphate
  modified_base 14: mod_base = OTHER; note = 2'-deoxy-2'-fluoroadenosine-3'-phosphate
  modified_base 15: mod_base = OTHER; note = 2'-O-methyladenosine-3'-phosphate
  modified_base 16: mod_base = OTHER; note = 2'-O-methylcytidine-3'-phosphate
  modified_base 17: mod_base = OTHER; note = 2'-O-methyluridine-3'-phosphate
  modified_base 18: mod_base = OTHER; note = 2'-O-methylguanosine-3'-phosphate
  modified_base 19: mod_base = OTHER; note = 2'-O-methylcytidine-3'-phosphate
  modified_base 20: mod_base = OTHER; note = 2'-O-methyladenosine-3'-phosphate
  modified_base 21: mod_base = OTHER; note = 2'-O-methyluridine-3'-phosphorothioate
  modified_base 22: mod_base = OTHER; note = 2'-O-methylguanosine-3'-phosphorothioate
  modified_base 23: mod_base = OTHER; note = 2'-O-methyluridine
  misc_feature 1: note = RNA
  misc_feature 3..4: note = RNA
  misc_feature 6: note = RNA
  misc_feature 8..11: note = RNA
  misc_feature 13..23: note = RNA
  misc_feature 2: note = DNA
  misc_feature 5: note = DNA
  misc_feature 7: note = DNA
  misc_feature 12: note = DNA
taatcaagtttacaactgcatgt

SEQ ID NO: 1073 - DNA, 23 bp, synthetic construct
  source 1..23: mol_type = other DNA
  modified_base 1: mod_base = OTHER; note = 2'-O-methyluridine-3'-phosphate 5'-(E)-Vinylphosphonate
  modified_base 2: mod_base = OTHER; note = 2'-deoxy-2'-fluorouridine-3'-phosphate
  modified_base 3: mod_base = OTHER; note = 2'-O-methylcytidine-3'-phosphate
  modified_base 4: mod_base = OTHER; note = 2'-O-methyladenosine-3'-phosphate
  modified_base 6: mod_base = OTHER; note = 2'-O-methyluridine-3'-phosphate
  modified_base 7: mod_base = OTHER; note = Thymidine-glycol nucleic acid (GNA), S-Isomer
  modified_base 8: mod_base = OTHER; note = 2'-O-methylcytidine-3'-phosphate
  modified_base 9: mod_base = OTHER; note = 2'-O-methyladenosine-3'-phosphate
  modified_base 10: mod_base = OTHER; note = 2'-O-methylguanosine-3'-phosphate
  modified_base 11: mod_base = OTHER; note = 2'-O-methylguanosine-3'-phosphate
  modified_base 12: mod_base = OTHER; note = 2'-O-methylguanosine-3'-phosphate
  modified_base 13: mod_base = OTHER; note = 2'-O-methyladenosine-3'-phosphate
  modified_base 14: mod_base = OTHER; note = 2'-deoxy-2'-fluorouridine-3'-phosphate
  modified_base 15: mod_base = OTHER; note = 2'-O-methyluridine-3'-phosphate
  modified_base 16: mod_base = OTHER; note = 2'-deoxy-2'-fluoroguanosine-3'-phosphate
  modified_base 17: mod_base = OTHER; note = 2'-O-methylcytidine-3'-phosphate
  modified_base 18: mod_base = OTHER; note = 2'-O-methyladenosine-3'-phosphate
  modified_base 19: mod_base = OTHER; note = 2'-O-methylcytidine-3'-phosphate
  modified_base 20: mod_base = OTHER; note = 2'-O-methylguanosine-3'-phosphate
  modified_base 21: mod_base = OTHER; note = 2'-O-methyluridine-3'-phosphorothioate
  modified_base 22: mod_base = OTHER; note = 2'-O-methylguanosine-3'-phosphorothioate
  modified_base 23: mod_base = OTHER; note = 2'-O-methyluridine
  misc_feature 1..4: note = RNA
  misc_feature 6..23: note = RNA
  misc_feature 5: note = DNA
ttcagttcagggattgcacgtgt

SEQ ID NO: 1074 - DNA, 23 bp, synthetic construct
  source 1..23: mol_type = other DNA
  modified_base 1: mod_base = OTHER; note = 2'-O-methyluridine-3'-phosphate 5'-(E)-Vinylphosphonate
  modified_base 2: mod_base = OTHER; note = 2'-deoxy-2'-fluorouridine-3'-phosphate
  modified_base 3: mod_base = OTHER; note = 2'-O-methyluridine-3'-phosphate
  modified_base 4: mod_base = OTHER; note = 2'-O-methylguanosine-3'-phosphate
  modified_base 6: mod_base = OTHER; note = 2'-O-methylcytidine-3'-phosphate
  modified_base 7: mod_base = OTHER; note = Adenosine-glycol nucleic acid (GNA), S-isomer
  modified_base 8: mod_base = OTHER; note = 2'-O-methylguanosine-3'-phosphate
  modified_base 9: mod_base = OTHER; note = 2'-O-methyluridine-3'-phosphate
  modified_base 10: mod_base = OTHER; note = 2'-O-methyluridine-3'-phosphate
  modified_base 11: mod_base = OTHER; note = 2'-O-methylcytidine-3'-phosphate
  modified_base 12: mod_base = OTHER; note = 2'-O-methyladenosine-3'-phosphate
  modified_base 13: mod_base = OTHER; note = 2'-O-methylguanosine-3'-phosphate
  modified_base 14: mod_base = OTHER; note = 2'-deoxy-2'-fluoroguanosine-3'-phosphate
  modified_base 15: mod_base = OTHER; note = 2'-O-methylguanosine-3'-phosphate
  modified_base 16: mod_base = OTHER; note = 2'-deoxy-2'-fluoroadenosine-3'-phosphate
  modified_base 17: mod_base = OTHER; note = 2'-O-methyluridine-3'-phosphate
  modified_base 18: mod_base = OTHER; note = 2'-O-methyluridine-3'-phosphate
  modified_base 19: mod_base = OTHER; note = 2'-O-methylguanosine-3'-phosphate
  modified_base 20: mod_base = OTHER; note = 2'-O-methylcytidine-3'-phosphate
  modified_base 21: mod_base = OTHER; note = 2'-O-methyladenosine-3'-phosphorothioate
  modified_base 22: mod_base = OTHER; note = 2'-O-methylcytidine-3'-phosphorothioate
  modified_base 23: mod_base = OTHER; note = 2'-O-methylguanosine
  misc_feature 1..4: note = RNA
  misc_feature 6..23: note = RNA
  misc_feature 5: note = DNA
tttgtcagttcagggattgcacg

SEQ ID NO: 1075 - DNA, 23 bp, synthetic construct
  source 1..23: mol_type = other DNA
  modified_base 1: mod_base = OTHER; note = 2'-O-methyluridine-3'-phosphate 5'-(E)-Vinylphosphonate
  modified_base 2: mod_base = OTHER; note = 2'-deoxy-2'-fluorouridine-3'-phosphate
  modified_base 3: mod_base = OTHER; note = 2'-O-methyluridine-3'-phosphate
  modified_base 4: mod_base = OTHER; note = 2'-O-methyladenosine-3'-phosphate
  modified_base 6: mod_base = OTHER; note = 2'-O-methyluridine-3'-phosphate
  modified_base 7: mod_base = OTHER; note = Adenosine-glycol nucleic acid (GNA), S-isomer
  modified_base 8: mod_base = OTHER; note = 2'-O-methyladenosine-3'-phosphate
  modified_base 9: mod_base = OTHER; note = 2'-O-methylcytidine-3'-phosphate
  modified_base 10: mod_base = OTHER; note = 2'-O-methylcytidine-3'-phosphate
  modified_base 11: mod_base = OTHER; note = 2'-O-methyladenosine-3'-phosphate
  modified_base 12: mod_base = OTHER; note = 2'-O-methylcytidine-3'-phosphate
  modified_base 13: mod_base = OTHER; note = 2'-O-methylcytidine-3'-phosphate
  modified_base 14: mod_base = OTHER; note = 2'-deoxy-2'-fluoroadenosine-3'-phosphate
  modified_base 15: mod_base = OTHER; note = 2'-O-methylcytidine-3'-phosphate
  modified_base 16: mod_base = OTHER; note = 2'-deoxy-2'-fluorocytidine-3'-phosphate
  modified_base 17: mod_base = OTHER; note = 2'-O-methyluridine-3'-phosphate
  modified_base 18: mod_base = OTHER; note = 2'-O-methylguanosine-3'-phosphate
  modified_base 19: mod_base = OTHER; note = 2'-O-methylguanosine-3'-phosphate
  modified_base 20: mod_base = OTHER; note = 2'-O-methyluridine-3'-phosphate
  modified_base 21: mod_base = OTHER; note = 2'-O-methylcytidine-3'-phosphorothioate
  modified_base 22: mod_base = OTHER; note = 2'-O-methylcytidine-3'-phosphorothioate
  modified_base 23: mod_base = OTHER; note = 2'-O-methyluridine
  misc_feature 1..4: note = RNA
  misc_feature 6..23: note = RNA
  misc_feature 5: note = DNA
tttattaaccaccacctggtcct

SEQ ID NO: 1076 - DNA, 23 bp, synthetic construct
  source 1..23: mol_type = other DNA
  modified_base 1: mod_base = OTHER; note = 2'-O-methyluridine-3'-phosphate 5'-(E)-Vinylphosphonate
  modified_base 3: mod_base = OTHER; note = 2'-O-methyluridine-3'-phosphate
  modified_base 4: mod_base = OTHER; note = 2'-O-methyladenosine-3'-phosphate
  modified_base 6: mod_base = OTHER; note = 2'-O-methyluridine-3'-phosphate
  modified_base 8: mod_base = OTHER; note = 2'-O-methyladenosine-3'-phosphate
  modified_base 9: mod_base = OTHER; note = 2'-O-methylcytidine-3'-phosphate
  modified_base 10: mod_base = OTHER; note = 2'-O-methylcytidine-3'-phosphate
  modified_base 11: mod_base = OTHER; note = 2'-O-methyladenosine-3'-phosphate
  modified_base 13: mod_base = OTHER; note = 2'-O-methylcytidine-3'-phosphate
  modified_base 14: mod_base = OTHER; note = 2'-deoxy-2'-fluoroadenosine-3'-phosphate
  modified_base 15: mod_base = OTHER; note = 2'-O-methylcytidine-3'-phosphate
  modified_base 16: mod_base = OTHER; note = 2'-O-methylcytidine-3'-phosphate
  modified_base 17: mod_base = OTHER; note = 2'-O-methyluridine-3'-phosphate
  modified_base 18: mod_base = OTHER; note = 2'-O-methylguanosine-3'-phosphate
  modified_base 19: mod_base = OTHER; note = 2'-O-methylguanosine-3'-phosphate
  modified_base 20: mod_base = OTHER; note = 2'-O-methyluridine-3'-phosphate
  modified_base 21: mod_base = OTHER; note = 2'-O-methylcytidine-3'-phosphorothioate
  modified_base 22: mod_base = OTHER; note = 2'-O-methylcytidine-3'-phosphorothioate
  modified_base 23: mod_base = OTHER; note = 2'-O-methyluridine
  misc_feature 1: note = RNA
  misc_feature 3..4: note = RNA
  misc_feature 6: note = RNA
  misc_feature 8..11: note = RNA
  misc_feature 13..23: note = RNA
  misc_feature 2: note = DNA
  misc_feature 5: note = DNA
  misc_feature 7: note = DNA
  misc_feature 12: note = DNA
tttattaaccaccacctggtcct

SEQ ID NO: 1077 - DNA, 23 bp, synthetic construct
  source 1..23: mol_type = other DNA
  modified_base 1: mod_base = OTHER; note = 2'-O-methyluridine-3'-phosphate 5'-(E)-Vinylphosphonate
  modified_base 3: mod_base = OTHER; note = 2'-O-methylcytidine-3'-phosphate
  modified_base 4: mod_base = OTHER; note = 2'-O-methyluridine-3'-phosphate
  modified_base 6: mod_base = OTHER; note = 2'-O-methyladenosine-3'-phosphate
  modified_base 8: mod_base = OTHER; note = 2'-O-methyluridine-3'-phosphate
  modified_base 9: mod_base = OTHER; note = 2'-O-methyladenosine-3'-phosphate
  modified_base 10: mod_base = OTHER; note = 2'-O-methyladenosine-3'-phosphate
  modified_base 11: mod_base = OTHER; note = 2'-O-methylcytidine-3'-phosphate
  modified_base 13: mod_base = OTHER; note = 2'-O-methyladenosine-3'-phosphate
  modified_base 14: mod_base = OTHER; note = 2'-deoxy-2'-fluorocytidine-3'-phosphate
  modified_base 15: mod_base = OTHER; note = 2'-O-methylcytidine-3'-phosphate
  modified_base 16: mod_base = OTHER; note = 2'-O-methyladenosine-3'-phosphate
  modified_base 17: mod_base = OTHER; note = 2'-O-methylcytidine-3'-phosphate
  modified_base 18: mod_base = OTHER; note = 2'-O-methylcytidine-3'-phosphate
  modified_base 19: mod_base = OTHER; note = 2'-O-methyluridine-3'-phosphate
  modified_base 20: mod_base = OTHER; note = 2'-O-methylguanosine-3'-phosphate
  modified_base 21: mod_base = OTHER; note = 2'-O-methylguanosine-3'-phosphorothioate
  modified_base 22: mod_base = OTHER; note = 2'-O-methyluridine-3'-phosphorothioate
  modified_base 23: mod_base = OTHER; note = 2'-O-methylcytidine
  misc_feature 1: note = RNA
  misc_feature 3..4: note = RNA
  misc_feature 6: note = RNA
  misc_feature 8..11: note = RNA
  misc_feature 13..23: note = RNA
  misc_feature 2: note = DNA
  misc_feature 5: note = DNA
  misc_feature 7: note = DNA
  misc_feature 12: note = DNA
tccttattaaccaccacctggtc

SEQ ID NO: 1078 - DNA, 23 bp, synthetic construct
  source 1..23: mol_type = other DNA
  modified_base 1: mod_base = OTHER; note = 2'-O-methyluridine-3'-phosphate 5'-(E)-Vinylphosphonate
  modified_base 2: mod_base = OTHER; note = 2'-deoxy-2'-fluoroadenosine-3'-phosphate
  modified_base 3: mod_base = OTHER; note = 2'-O-methyluridine-3'-phosphate
  modified_base 4: mod_base = OTHER; note = 2'-O-methyladenosine-3'-phosphate
  modified_base 6: mod_base = OTHER; note = 2'-O-methylcytidine-3'-phosphate
  modified_base 7: mod_base = OTHER; note = Thymidine-glycol nucleic acid (GNA), S-Isomer
  modified_base 8: mod_base = OTHER; note = 2'-O-methylguanosine-3'-phosphate
  modified_base 9: mod_base = OTHER; note = 2'-O-methylcytidine-3'-phosphate
  modified_base 10: mod_base = OTHER; note = 2'-O-methyladenosine-3'-phosphate
  modified_base 11: mod_base = OTHER; note = 2'-O-methylguanosine-3'-phosphate
  modified_base 12: mod_base = OTHER; note = 2'-O-methylcytidine-3'-phosphate
  modified_base 13: mod_base = OTHER; note = 2'-O-methylcytidine-3'-phosphate
  modified_base 14: mod_base = OTHER; note = 2'-deoxy-2'-fluorouridine-3'-phosphate
  modified_base 15: mod_base = OTHER; note = 2'-O-methyluridine-3'-phosphate
  modified_base 16: mod_base = OTHER; note = 2'-deoxy-2'-fluoroadenosine-3'-phosphate
  modified_base 17: mod_base = OTHER; note = 2'-O-methyluridine-3'-phosphate
  modified_base 18: mod_base = OTHER; note = 2'-O-methyluridine-3'-phosphate
  modified_base 19: mod_base = OTHER; note = 2'-O-methyladenosine-3'-phosphate
  modified_base 20: mod_base = OTHER; note = 2'-O-methyladenosine-3'-phosphate
  modified_base 21: mod_base = OTHER; note = 2'-O-methylcytidine-3'-phosphorothioate
  modified_base 22: mod_base = OTHER; note = 2'-O-methylcytidine-3'-phosphorothioate
  modified_base 23: mod_base = OTHER; note = 2'-O-methyladenosine
  misc_feature 1..4: note = RNA
  misc_feature 6..23: note = RNA
  misc_feature 5: note = DNA
tataactgcagccttattaacca

SEQ ID NO: 1079 - DNA, 23 bp, synthetic construct
  source 1..23: mol_type = other DNA
  modified_base 1: mod_base = OTHER; note = 2'-O-methyluridine-3'-phosphate 5'-(E)-Vinylphosphonate
  modified_base 2: mod_base = OTHER; note = 2'-deoxy-2'-fluoroadenosine-3'-phosphate
  modified_base 3: mod_base = OTHER; note = 2'-O-methyluridine-3'-phosphate
  modified_base 4: mod_base = OTHER; note = 2'-O-methyladenosine-3'-phosphate
  modified_base 6: mod_base = OTHER; note = 2'-O-methylcytidine-3'-phosphate
  modified_base 7: mod_base = OTHER; note = Adenosine-glycol nucleic acid (GNA), S-isomer
  modified_base 8: mod_base = OTHER; note = 2'-O-methylguanosine-3'-phosphate
  modified_base 9: mod_base = OTHER; note = 2'-O-methyladenosine-3'-phosphate
  modified_base 10: mod_base = OTHER; note = 2'-O-methylcytidine-3'-phosphate
  modified_base 11: mod_base = OTHER; note = 2'-O-methyladenosine-3'-phosphate
  modified_base 12: mod_base = OTHER; note = 2'-O-methylcytidine-3'-phosphate
  modified_base 13: mod_base = OTHER; note = 2'-O-methylcytidine-3'-phosphate
  modified_base 14: mod_base = OTHER; note = 2'-deoxy-2'-fluoroadenosine-3'-phosphate
  modified_base 15: mod_base = OTHER; note = 2'-O-methyluridine-3'-phosphate
  modified_base 16: mod_base = OTHER; note = 2'-deoxy-2'-fluorocytidine-3'-phosphate
  modified_base 17: mod_base = OTHER; note = 2'-O-methyluridine-3'-phosphate
  modified_base 18: mod_base = OTHER; note = 2'-O-methylguanosine-3'-phosphate
  modified_base 19: mod_base = OTHER; note = 2'-O-methyladenosine-3'-phosphate
  modified_base 20: mod_base = OTHER; note = 2'-O-methylguanosine-3'-phosphate
  modified_base 21: mod_base = OTHER; note = 2'-O-methylguanosine-3'-phosphorothioate
  modified_base 22: mod_base = OTHER; note = 2'-O-methyladenosine-3'-phosphorothioate
  modified_base 23: mod_base = OTHER; note = 2'-O-methylguanosine
  misc_feature 1..4: note = RNA
  misc_feature 6..23: note = RNA
  misc_feature 5: note = DNA
tatagcagacaccatctgaggag

SEQ ID NO: 1080 - DNA, 23 bp, synthetic construct
  source 1..23: mol_type = other DNA
  modified_base 1: mod_base = OTHER; note = 2'-O-methyluridine-3'-phosphate 5'-(E)-Vinylphosphonate
  modified_base 3: mod_base = OTHER; note = 2'-O-methyladenosine-3'-phosphate
  modified_base 4: mod_base = OTHER; note = 2'-O-methyladenosine-3'-phosphate
  modified_base 6: mod_base = OTHER; note = 2'-O-methyladenosine-3'-phosphate
  modified_base 8: mod_base = OTHER; note = 2'-O-methylcytidine-3'-phosphate
  modified_base 9: mod_base = OTHER; note = 2'-O-methyladenosine-3'-phosphate
  modified_base 10: mod_base = OTHER; note = 2'-O-methylguanosine-3'-phosphate
  modified_base 11: mod_base = OTHER; note = 2'-O-methyladenosine-3'-phosphate
  modified_base 13: mod_base = OTHER; note = 2'-O-methyladenosine-3'-phosphate
  modified_base 14: mod_base = OTHER; note = 2'-deoxy-2'-fluorocytidine-3'-phosphate
  modified_base 15: mod_base = OTHER; note = 2'-O-methylcytidine-3'-phosphate
  modified_base 16: mod_base = OTHER; note = 2'-O-methyladenosine-3'-phosphate
  modified_base 17: mod_base = OTHER; note = 2'-O-methyluridine-3'-phosphate
  modified_base 18: mod_base = OTHER; note = 2'-O-methylcytidine-3'-phosphate
  modified_base 19: mod_base = OTHER; note = 2'-O-methyluridine-3'-phosphate
  modified_base 20: mod_base = OTHER; note = 2'-O-methylguanosine-3'-phosphate
  modified_base 21: mod_base = OTHER; note = 2'-O-methyladenosine-3'-phosphorothioate
  modified_base 22: mod_base = OTHER; note = 2'-O-methylguanosine-3'-phosphorothioate
  modified_base 23: mod_base = OTHER; note = 2'-O-methylguanosine
  misc_feature 1: note = RNA
  misc_feature 3..4: note = RNA
  misc_feature 6: note = RNA
  misc_feature 8..11: note = RNA
  misc_feature 13..23: note = RNA
  misc_feature 2: note = DNA
  misc_feature 5: note = DNA
  misc_feature 7: note = DNA
  misc_feature 12: note = DNA
tcaatagcagacaccatctgagg

SEQ ID NO: 1081 - DNA, 23 bp, synthetic construct
  source 1..23: mol_type = other DNA
  modified_base 1: mod_base = OTHER; note = 2'-O-methyluridine-3'-phosphate 5'-(E)-Vinylphosphonate
  modified_base 2: mod_base = OTHER; note = 2'-deoxy-2'-fluorouridine-3'-phosphate
  modified_base 3: mod_base = OTHER; note = 2'-O-methyladenosine-3'-phosphate
  modified_base 4: mod_base = OTHER; note = 2'-O-methylcytidine-3'-phosphate
  modified_base 6: mod_base = OTHER; note = 2'-O-methyladenosine-3'-phosphate
  modified_base 7: mod_base = OTHER; note = Thymidine-glycol nucleic acid (GNA), S-Isomer
  modified_base 8: mod_base = OTHER; note = 2'-O-methyladenosine-3'-phosphate
  modified_base 9: mod_base = OTHER; note = 2'-O-methylguanosine-3'-phosphate
  modified_base 10: mod_base = OTHER; note = 2'-O-methylcytidine-3'-phosphate
  modified_base 11: mod_base = OTHER; note = 2'-O-methyladenosine-3'-phosphate
  modified_base 12: mod_base = OTHER; note = 2'-O-methylguanosine-3'-phosphate
  modified_base 13: mod_base = OTHER; note = 2'-O-methyladenosine-3'-phosphate
  modified_base 14: mod_base = OTHER; note = 2'-deoxy-2'-fluorocytidine-3'-phosphate
  modified_base 15: mod_base = OTHER; note = 2'-O-methyladenosine-3'-phosphate
  modified_base 16: mod_base = OTHER; note = 2'-deoxy-2'-fluorocytidine-3'-phosphate
  modified_base 17: mod_base = OTHER; note = 2'-O-methylcytidine-3'-phosphate
  modified_base 18: mod_base = OTHER; note = 2'-O-methyladenosine-3'-phosphate
  modified_base 19: mod_base = OTHER; note = 2'-O-methyluridine-3'-phosphate
  modified_base 20: mod_base = OTHER; note = 2'-O-methylcytidine-3'-phosphate
  modified_base 21: mod_base = OTHER; note = 2'-O-methyluridine-3'-phosphorothioate
  modified_base 22: mod_base = OTHER; note = 2'-O-methylguanosine-3'-phosphorothioate
  modified_base 23: mod_base = OTHER; note = 2'-O-methyladenosine
  misc_feature 1..4: note = RNA
  misc_feature 6..23: note = RNA
  misc_feature 5: note = DNA
ttacaatagcagacaccatctga

SEQ ID NO: 1082 - DNA, 23 bp, synthetic construct
  source 1..23: mol_type = other DNA
  modified_base 1: mod_base = OTHER; note = 2'-O-methyluridine-3'-phosphate 5'-(E)-Vinylphosphonate
  modified_base 3: mod_base = OTHER; note = 2'-O-methyladenosine-3'-phosphate
  modified_base 4: mod_base = OTHER; note = 2'-O-methylcytidine-3'-phosphate
  modified_base 6: mod_base = OTHER; note = 2'-O-methyladenosine-3'-phosphate
  modified_base 8: mod_base = OTHER; note = 2'-O-methyladenosine-3'-phosphate
  modified_base 9: mod_base = OTHER; note = 2'-O-methylguanosine-3'-phosphate
  modified_base 10: mod_base = OTHER; note = 2'-O-methylcytidine-3'-phosphate
  modified_base 11: mod_base = OTHER; note = 2'-O-methyladenosine-3'-phosphate
  modified_base 13: mod_base = OTHER; note = 2'-O-methyladenosine-3'-phosphate
  modified_base 14: mod_base = OTHER; note = 2'-deoxy-2'-fluorocytidine-3'-phosphate
  modified_base 15: mod_base = OTHER; note = 2'-O-methyladenosine-3'-phosphate
  modified_base 16: mod_base = OTHER; note = 2'-O-methylcytidine-3'-phosphate
  modified_base 17: mod_base = OTHER; note = 2'-O-methylcytidine-3'-phosphate
  modified_base 18: mod_base = OTHER; note = 2'-O-methyladenosine-3'-phosphate
  modified_base 19: mod_base = OTHER; note = 2'-O-methyluridine-3'-phosphate
  modified_base 20: mod_base = OTHER; note = 2'-O-methylcytidine-3'-phosphate
  modified_base 21: mod_base = OTHER; note = 2'-O-methyluridine-3'-phosphorothioate
  modified_base 22: mod_base = OTHER; note = 2'-O-methylguanosine-3'-phosphorothioate
  modified_base 23: mod_base = OTHER; note = 2'-O-methyladenosine
  misc_feature 1: note = RNA
  misc_feature 3..4: note = RNA
  misc_feature 6: note = RNA
  misc_feature 8..11: note = RNA
  misc_feature 13..23: note = RNA
  misc_feature 2: note = DNA
  misc_feature 5: note = DNA
  misc_feature 7: note = DNA
  misc_feature 12: note = DNA
ttacaatagcagacaccatctga

SEQ ID NO: 1083 - DNA, 23 bp, synthetic construct
  source 1..23: mol_type = other DNA
  modified_base 1: mod_base = OTHER; note = 2'-O-methyluridine-3'-phosphate 5'-(E)-Vinylphosphonate
  modified_base 2: mod_base = OTHER; note = 2'-deoxy-2'-fluorouridine-3'-phosphate
  modified_base 3: mod_base = OTHER; note = 2'-O-methyluridine-3'-phosphate
  modified_base 4: mod_base = OTHER; note = 2'-O-methylguanosine-3'-phosphate
  modified_base 6: mod_base = OTHER; note = 2'-O-methyladenosine-3'-phosphate
  modified_base 7: mod_base = OTHER; note = Thymidine-glycol nucleic acid (GNA), S-Isomer
  modified_base 8: mod_base = OTHER; note = 2'-O-methyluridine-3'-phosphate
  modified_base 9: mod_base = OTHER; note = 2'-O-methylcytidine-3'-phosphate
  modified_base 10: mod_base = OTHER; note = 2'-O-methyluridine-3'-phosphate
  modified_base 11: mod_base = OTHER; note = 2'-O-methylguanosine-3'-phosphate
  modified_base 12: mod_base = OTHER; note = 2'-O-methylcytidine-3'-phosphate
  modified_base 13: mod_base = OTHER; note = 2'-O-methyladenosine-3'-phosphate
  modified_base 14: mod_base = OTHER; note = 2'-deoxy-2'-fluorouridine-3'-phosphate
  modified_base 15: mod_base = OTHER; note = 2'-O-methylguanosine-3'-phosphate
  modified_base 16: mod_base = OTHER; note = 2'-deoxy-2'-fluoroguanosine-3'-phosphate
  modified_base 17: mod_base = OTHER; note = 2'-O-methyluridine-3'-phosphate
  modified_base 18: mod_base = OTHER; note = 2'-O-methyladenosine-3'-phosphate
  modified_base 19: mod_base = OTHER; note = 2'-O-methylcytidine-3'-phosphate
  modified_base 20: mod_base = OTHER; note = 2'-O-methylguanosine-3'-phosphate
  modified_base 21: mod_base = OTHER; note = 2'-O-methyluridine-3'-phosphorothioate
  modified_base 22: mod_base = OTHER; note = 2'-O-methyladenosine-3'-phosphorothioate
  modified_base 23: mod_base = OTHER; note = 2'-O-methylcytidine
  misc_feature 1..4: note = RNA
  misc_feature 6..23: note = RNA
  misc_feature 5: note = DNA
tttgtattctgcatggtacgtac

SEQ ID NO: 1084 - DNA, 23 bp, synthetic construct
  source 1..23: mol_type = other DNA
  modified_base 1: mod_base = OTHER; note = 2'-O-methyluridine-3'-phosphate 5'-(E)-Vinylphosphonate
  modified_base 3: mod_base = OTHER; note = 2'-O-methyluridine-3'-phosphate
  modified_base 4: mod_base = OTHER; note = 2'-O-methylguanosine-3'-phosphate
  modified_base 6: mod_base = OTHER; note = 2'-O-methyladenosine-3'-phosphate
  modified_base 8: mod_base = OTHER; note = 2'-O-methyluridine-3'-phosphate
  modified_base 9: mod_base = OTHER; note = 2'-O-methylcytidine-3'-phosphate
  modified_base 10: mod_base = OTHER; note = 2'-O-methyluridine-3'-phosphate
  modified_base 11: mod_base = OTHER; note = 2'-O-methylguanosine-3'-phosphate
  modified_base 13: mod_base = OTHER; note = 2'-O-methyladenosine-3'-phosphate
  modified_base 14: mod_base = OTHER; note = 2'-deoxy-2'-fluorouridine-3'-phosphate
  modified_base 15: mod_base = OTHER; note = 2'-O-methylguanosine-3'-phosphate
  modified_base 16: mod_base = OTHER; note = 2'-O-methylguanosine-3'-phosphate
  modified_base 17: mod_base = OTHER; note = 2'-O-methyluridine-3'-phosphate
  modified_base 18: mod_base = OTHER; note = 2'-O-methyladenosine-3'-phosphate
  modified_base 19: mod_base = OTHER; note = 2'-O-methylcytidine-3'-phosphate
  modified_base 20: mod_base = OTHER; note = 2'-O-methylguanosine-3'-phosphate
  modified_base 21: mod_base = OTHER; note = 2'-O-methyluridine-3'-phosphorothioate
  modified_base 22: mod_base = OTHER; note = 2'-O-methyladenosine-3'-phosphorothioate
  modified_base 23: mod_base = OTHER; note = 2'-O-methylcytidine
  misc_feature 1: note = RNA
  misc_feature 3..4: note = RNA
  misc_feature 6: note = RNA
  misc_feature 8..11: note = RNA
  misc_feature 13..23: note = RNA
  misc_feature 2: note = DNA
  misc_feature 5: note = DNA
  misc_feature 7: note = DNA
  misc_feature 12: note = DNA
tttgtattctgcatggtacgtac

SEQ ID NO: 1085 - DNA, 23 bp, synthetic construct
  source 1..23: mol_type = other DNA
  modified_base 1: mod_base = OTHER; note = 2'-O-methyluridine-3'-phosphate 5'-(E)-Vinylphosphonate
  modified_base 2: mod_base = OTHER; note = 2'-deoxy-2'-fluorouridine-3'-phosphate
  modified_base 3: mod_base = OTHER; note = 2'-O-methyluridine-3'-phosphate
  modified_base 4: mod_base = OTHER; note = 2'-O-methyluridine-3'-phosphate
  modified_base 6: mod_base = OTHER; note = 2'-O-methyluridine-3'-phosphate
  modified_base 7: mod_base = OTHER; note = Adenosine-glycol nucleic acid (GNA), S-isomer
  modified_base 8: mod_base = OTHER; note = 2'-O-methyluridine-3'-phosphate
  modified_base 9: mod_base = OTHER; note = 2'-O-methyluridine-3'-phosphate
  modified_base 10: mod_base = OTHER; note = 2'-O-methylcytidine-3'-phosphate
  modified_base 11: mod_base = OTHER; note = 2'-O-methyluridine-3'-phosphate
  modified_base 12: mod_base = OTHER; note = 2'-O-methylguanosine-3'-phosphate
  modified_base 13: mod_base = OTHER; note = 2'-O-methylcytidine-3'-phosphate
  modified_base 14: mod_base = OTHER; note = 2'-deoxy-2'-fluoroadenosine-3'-phosphate
  modified_base 15: mod_base = OTHER; note = 2'-O-methyluridine-3'-phosphate
  modified_base 16: mod_base = OTHER; note = 2'-deoxy-2'-fluoroguanosine-3'-phosphate
  modified_base 17: mod_base = OTHER; note = 2'-O-methylguanosine-3'-phosphate
  modified_base 18: mod_base = OTHER; note = 2'-O-methyluridine-3'-phosphate
  modified_base 19: mod_base = OTHER; note = 2'-O-methyladenosine-3'-phosphate
  modified_base 20: mod_base = OTHER; note = 2'-O-methylcytidine-3'-phosphate
  modified_base 21: mod_base = OTHER; note = 2'-O-methylguanosine-3'-phosphorothioate
  modified_base 22: mod_base = OTHER; note = 2'-O-methyluridine-3'-phosphorothioate
  modified_base 23: mod_base = OTHER; note = 2'-O-methyladenosine
  misc_feature 1..4: note = RNA
  misc_feature 6..23: note = RNA
  misc_feature 5: note = DNA
ttttgtattctgcatggtacgta

SEQ ID NO: 1086 - DNA, 23 bp, synthetic construct
  source 1..23: mol_type = other DNA
  modified_base 1: mod_base = OTHER; note = 2'-O-methyluridine-3'-phosphate 5'-(E)-Vinylphosphonate
  modified_base 2: mod_base = OTHER; note = 2'-deoxy-2'-fluoroadenosine-3'-phosphate
  modified_base 3: mod_base = OTHER; note = 2'-O-methyluridine-3'-phosphate
  modified_base 4: mod_base = OTHER; note = 2'-O-methyluridine-3'-phosphate
  modified_base 6: mod_base = OTHER; note = 2'-O-methylguanosine-3'-phosphate
  modified_base 7: mod_base = OTHER; note = Thymidine-glycol nucleic acid (GNA), S-Isomer
  modified_base 8: mod_base = OTHER; note = 2'-O-methyladenosine-3'-phosphate
  modified_base 9: mod_base = OTHER; note = 2'-O-methyluridine-3'-phosphate
  modified_base 10: mod_base = OTHER; note = 2'-O-methyluridine-3'-phosphate
  modified_base 11: mod_base = OTHER; note = 2'-O-methylcytidine-3'-phosphate
  modified_base 12: mod_base = OTHER; note = 2'-O-methyluridine-3'-phosphate
  modified_base 13: mod_base = OTHER; note = 2'-O-methylguanosine-3'-phosphate
  modified_base 14: mod_base = OTHER; note = 2'-deoxy-2'-fluorocytidine-3'-phosphate
  modified_base 15: mod_base = OTHER; note = 2'-O-methyladenosine-3'-phosphate
  modified_base 16: mod_base = OTHER; note = 2'-deoxy-2'-fluorouridine-3'-phosphate
  modified_base 17: mod_base = OTHER; note = 2'-O-methylguanosine-3'-phosphate
  modified_base 18: mod_base = OTHER; note = 2'-O-methylguanosine-3'-phosphate
  modified_base 19: mod_base = OTHER; note = 2'-O-methyluridine-3'-phosphate
  modified_base 20: mod_base = OTHER; note = 2'-O-methyladenosine-3'-phosphate
  modified_base 21: mod_base = OTHER; note = 2'-O-methylcytidine-3'-phosphorothioate
  modified_base 22: mod_base = OTHER; note = 2'-O-methylguanosine-3'-phosphorothioate
  modified_base 23: mod_base = OTHER; note = 2'-O-methyluridine
  misc_feature 1..4: note = RNA
  misc_feature 6..23: note = RNA
  misc_feature 5: note = DNA
tatttgtattctgcatggtacgt

SEQ ID NO: 1087 - DNA, 23 bp, synthetic construct
  source 1..23: mol_type = other DNA
  modified_base 1: mod_base = OTHER; note = 2'-O-methyluridine-3'-phosphate 5'-(E)-Vinylphosphonate
  modified_base 3: mod_base = OTHER; note = 2'-O-methyladenosine-3'-phosphate
  modified_base 4: mod_base = OTHER; note = 2'-O-methyluridine-3'-phosphate
  modified_base 6: mod_base = OTHER; note = 2'-O-methyluridine-3'-phosphate
  modified_base 8: mod_base = OTHER; note = 2'-O-methyluridine-3'-phosphate
  modified_base 9: mod_base = OTHER; note = 2'-O-methyladenosine-3'-phosphate
  modified_base 10: mod_base = OTHER; note = 2'-O-methyluridine-3'-phosphate
  modified_base 11: mod_base = OTHER; note = 2'-O-methyluridine-3'-phosphate
  modified_base 13: mod_base = OTHER; note = 2'-O-methyluridine-3'-phosphate
  modified_base 14: mod_base = OTHER; note = 2'-deoxy-2'-fluoroguanosine-3'-phosphate
  modified_base 15: mod_base = OTHER; note = 2'-O-methylcytidine-3'-phosphate
  modified_base 16: mod_base = OTHER; note = 2'-O-methyladenosine-3'-phosphate
  modified_base 17: mod_base = OTHER; note = 2'-O-methyluridine-3'-phosphate
  modified_base 18: mod_base = OTHER; note = 2'-O-methylguanosine-3'-phosphate
  modified_base 19: mod_base = OTHER; note = 2'-O-methylguanosine-3'-phosphate
  modified_base 20: mod_base = OTHER; note = 2'-O-methyluridine-3'-phosphate
  modified_base 21: mod_base = OTHER; note = 2'-O-methyladenosine-3'-phosphorothioate
  modified_base 22: mod_base = OTHER; note = 2'-O-methylcytidine-3'-phosphorothioate
  modified_base 23: mod_base = OTHER; note = 2'-O-methylguanosine
  misc_feature 1: note = RNA
  misc_feature 3..4: note = RNA
  misc_feature 6: note = RNA
  misc_feature 8..11: note = RNA
  misc_feature 13..23: note = RNA
  misc_feature 2: note = DNA
  misc_feature 5: note = DNA
  misc_feature 7: note = DNA
  misc_feature 12: note = DNA
tcatttgtattctgcatggtacg

SEQ ID NO: 1088 - DNA, 23 bp, synthetic construct
  source 1..23: mol_type = other DNA
  modified_base 1: mod_base = OTHER; note = 2'-O-methyluridine-3'-phosphate 5'-(E)-Vinylphosphonate
  modified_base 3: mod_base = OTHER; note = 2'-O-methylcytidine-3'-phosphate
  modified_base 4: mod_base = OTHER; note = 2'-O-methyladenosine-3'-phosphate
  modified_base 6: mod_base = OTHER; note = 2'-O-methyluridine-3'-phosphate
  modified_base 8: mod_base = OTHER; note = 2'-O-methylguanosine-3'-phosphate
  modified_base 9: mod_base = OTHER; note = 2'-O-methyluridine-3'-phosphate
  modified_base 10: mod_base = OTHER; note = 2'-O-methyladenosine-3'-phosphate
  modified_base 11: mod_base = OTHER; note = 2'-O-methyluridine-3'-phosphate
  modified_base 13: mod_base = OTHER; note = 2'-O-methylcytidine-3'-phosphate
  modified_base 14: mod_base = OTHER; note = 2'-deoxy-2'-fluorouridine-3'-phosphate
  modified_base 15: mod_base = OTHER; note = 2'-O-methylguanosine-3'-phosphate
  modified_base 16: mod_base = OTHER; note = 2'-O-methylcytidine-3'-phosphate
  modified_base 17: mod_base = OTHER; note = 2'-O-methyladenosine-3'-phosphate
  modified_base 18: mod_base = OTHER; note = 2'-O-methyluridine-3'-phosphate
  modified_base 19: mod_base = OTHER; note = 2'-O-methylguanosine-3'-phosphate
  modified_base 20: mod_base = OTHER; note = 2'-O-methylguanosine-3'-phosphate
  modified_base 21: mod_base = OTHER; note = 2'-O-methyluridine-3'-phosphorothioate
  modified_base 22: mod_base = OTHER; note = 2'-O-methyladenosine-3'-phosphorothioate
  modified_base 23: mod_base = OTHER; note = 2'-O-methylcytidine
  misc_feature 1: note = RNA
  misc_feature 3..4: note = RNA
  misc_feature 6: note = RNA
  misc_feature 8..11: note = RNA
  misc_feature 13..23: note = RNA
  misc_feature 2: note = DNA
  misc_feature 5: note = DNA
  misc_feature 7: note = DNA
  misc_feature 12: note = DNA
ttcatttgtattctgcatggtac

SEQ ID NO: 1089 - DNA, 23 bp, synthetic construct
  source 1..23: mol_type = other DNA
  modified_base 1: mod_base = OTHER; note = 2'-O-methyluridine-3'-phosphate 5'-(E)-Vinylphosphonate
  modified_base 3: mod_base = OTHER; note = 2'-O-methyluridine-3'-phosphate
  modified_base 4: mod_base = OTHER; note = 2'-O-methylcytidine-3'-phosphate
  modified_base 6: mod_base = OTHER; note = 2'-O-methyluridine-3'-phosphate
  modified_base 8: mod_base = OTHER; note = 2'-O-methyluridine-3'-phosphate
  modified_base 9: mod_base = OTHER; note = 2'-O-methylguanosine-3'-phosphate
  modified_base 10: mod_base = OTHER; note = 2'-O-methyluridine-3'-phosphate
  modified_base 11: mod_base = OTHER; note = 2'-O-methyladenosine-3'-phosphate
  modified_base 13: mod_base = OTHER; note = 2'-O-methyluridine-3'-phosphate
  modified_base 14: mod_base = OTHER; note = 2'-deoxy-2'-fluorocytidine-3'-phosphate
  modified_base 15: mod_base = OTHER; note = 2'-O-methyluridine-3'-phosphate
  modified_base 16: mod_base = OTHER; note = 2'-O-methylguanosine-3'-phosphate
  modified_base 17: mod_base = OTHER; note = 2'-O-methylcytidine-3'-phosphate
  modified_base 18: mod_base = OTHER; note = 2'-O-methyladenosine-3'-phosphate
  modified_base 19: mod_base = OTHER; note = 2'-O-methyluridine-3'-phosphate
  modified_base 20: mod_base = OTHER; note = 2'-O-methylguanosine-3'-phosphate
  modified_base 21: mod_base = OTHER; note = 2'-O-methylguanosine-3'-phosphorothioate
  modified_base 22: mod_base = OTHER; note = 2'-O-methyluridine-3'-phosphorothioate
  modified_base 23: mod_base = OTHER; note = 2'-O-methyladenosine
  misc_feature 1: note = RNA
  misc_feature 3..4: note = RNA
  misc_feature 6: note = RNA
  misc_feature 8..11: note = RNA
  misc_feature 13..23: note = RNA
  misc_feature 2: note = DNA
  misc_feature 5: note = DNA
  misc_feature 7: note = DNA
  misc_feature 12: note = DNA
tatcatttgtattctgcatggta

SEQ ID NO: 1090 - DNA, 23 bp, synthetic construct
  source 1..23: mol_type = other DNA
  modified_base 1: mod_base = OTHER; note = 2'-O-methyluridine-3'-phosphate 5'-(E)-Vinylphosphonate
  modified_base 3: mod_base = OTHER; note = 2'-O-methyladenosine-3'-phosphate
  modified_base 4: mod_base = OTHER; note = 2'-O-methyluridine-3'-phosphate
  modified_base 6: mod_base = OTHER; note = 2'-O-methyladenosine-3'-phosphate
  modified_base 8: mod_base = OTHER; note = 2'-O-methyluridine-3'-phosphate
  modified_base 9: mod_base = OTHER; note = 2'-O-methyluridine-3'-phosphate
  modified_base 10: mod_base = OTHER; note = 2'-O-methylguanosine-3'-phosphate
  modified_base 11: mod_base = OTHER; note = 2'-O-methyluridine-3'-phosphate
  modified_base 13: mod_base = OTHER; note = 2'-O-methyluridine-3'-phosphate
  modified_base 14: mod_base = OTHER; note = 2'-deoxy-2'-fluorouridine-3'-phosphate
  modified_base 15: mod_base = OTHER; note = 2'-O-methylcytidine-3'-phosphate
  modified_base 16: mod_base = OTHER; note = 2'-O-methyluridine-3'-phosphate
  modified_base 17: mod_base = OTHER; note = 2'-O-methylguanosine-3'-phosphate
  modified_base 18: mod_base = OTHER; note = 2'-O-methylcytidine-3'-phosphate
  modified_base 19: mod_base = OTHER; note = 2'-O-methyladenosine-3'-phosphate
  modified_base 20: mod_base = OTHER; note = 2'-O-methyluridine-3'-phosphate
  modified_base 21: mod_base = OTHER; note = 2'-O-methylguanosine-3'-phosphorothioate
  modified_base 22: mod_base = OTHER; note = 2'-O-methylguanosine-3'-phosphorothioate
  modified_base 23: mod_base = OTHER; note = 2'-O-methyluridine
  misc_feature 1: note = RNA
  misc_feature 3..4: note = RNA
  misc_feature 6: note = RNA
  misc_feature 8..11: note = RNA
  misc_feature 13..23: note = RNA
  misc_feature 2: note = DNA
  misc_feature 5: note = DNA
  misc_feature 7: note = DNA
  misc_feature 12: note = DNA
tcatcatttgtattctgcatggt

SEQ ID NO: 1091 - DNA, 23 bp, synthetic construct
  source 1..23: mol_type = other DNA
  modified_base 1: mod_base = OTHER; note = 2'-O-methyluridine-3'-phosphate 5'-(E)-Vinylphosphonate
  modified_base 2: mod_base = OTHER; note = 2'-deoxy-2'-fluoroadenosine-3'-phosphate
  modified_base 3: mod_base = OTHER; note = 2'-O-methylcytidine-3'-phosphate
  modified_base 4: mod_base = OTHER; note = 2'-O-methyladenosine-3'-phosphate
  modified_base 6: mod_base = OTHER; note = 2'-O-methylcytidine-3'-phosphate
  modified_base 7: mod_base = OTHER; note = Adenosine-glycol nucleic acid (GNA), S-isomer
  modified_base 8: mod_base = OTHER; note = 2'-O-methyluridine-3'-phosphate
  modified_base 9: mod_base = OTHER; note = 2'-O-methyluridine-3'-phosphate
  modified_base 10: mod_base = OTHER; note = 2'-O-methyluridine-3'-phosphate
  modified_base 11: mod_base = OTHER; note = 2'-O-methylguanosine-3'-phosphate
  modified_base 12: mod_base = OTHER; note = 2'-O-methyluridine-3'-phosphate
  modified_base 13: mod_base = OTHER; note = 2'-O-methyladenosine-3'-phosphate
  modified_base 14: mod_base = OTHER; note = 2'-deoxy-2'-fluorouridine-3'-phosphate
  modified_base 15: mod_base = OTHER; note = 2'-O-methyluridine-3'-phosphate
  modified_base 16: mod_base = OTHER; note = 2'-deoxy-2'-fluorocytidine-3'-phosphate
  modified_base 17: mod_base = OTHER; note = 2'-O-methyluridine-3'-phosphate
  modified_base 18: mod_base = OTHER; note = 2'-O-methylguanosine-3'-phosphate
  modified_base 19: mod_base = OTHER; note = 2'-O-methylcytidine-3'-phosphate
  modified_base 20: mod_base = OTHER; note = 2'-O-methyladenosine-3'-phosphate
  modified_base 21: mod_base = OTHER; note = 2'-O-methyluridine-3'-phosphorothioate
  modified_base 22: mod_base = OTHER; note = 2'-O-methylguanosine-3'-phosphorothioate
  modified_base 23: mod_base = OTHER; note = 2'-O-methylguanosine
  misc_feature 1..4: note = RNA
  misc_feature 6..23: note = RNA
  misc_feature 5: note = DNA
tacatcatttgtattctgcatgg

SEQ ID NO: 1092 - DNA, 23 bp, synthetic construct
  source 1..23: mol_type = other DNA
  modified_base 1: mod_base = OTHER; note = 2'-O-methyluridine-3'-phosphate 5'-(E)-Vinylphosphonate
  modified_base 3: mod_base = OTHER; note = 2'-O-methyluridine-3'-phosphate
  modified_base 4: mod_base = OTHER; note = 2'-O-methyladenosine-3'-phosphate
  modified_base 6: mod_base = OTHER; note = 2'-O-methyladenosine-3'-phosphate
  modified_base 8: mod_base = OTHER; note = 2'-O-methylcytidine-3'-phosphate
  modified_base 9: mod_base = OTHER; note = 2'-O-methyladenosine-3'-phosphate
  modified_base 10: mod_base = OTHER; note = 2'-O-methyluridine-3'-phosphate
  modified_base 11: mod_base = OTHER; note = 2'-O-methyluridine-3'-phosphate
  modified_base 13: mod_base = OTHER; note = 2'-O-methylguanosine-3'-phosphate
  modified_base 14: mod_base = OTHER; note = 2'-deoxy-2'-fluorouridine-3'-phosphate
  modified_base 15: mod_base = OTHER; note = 2'-O-methyladenosine-3'-phosphate
  modified_base 16: mod_base = OTHER; note = 2'-O-methyluridine-3'-phosphate
  modified_base 17: mod_base = OTHER; note = 2'-O-methyluridine-3'-phosphate
  modified_base 18: mod_base = OTHER; note = 2'-O-methylcytidine-3'-phosphate
  modified_base 19: mod_base = OTHER; note = 2'-O-methyluridine-3'-phosphate
  modified_base 20: mod_base = OTHER; note = 2'-O-methylguanosine-3'-phosphate
  modified_base 21: mod_base = OTHER; note = 2'-O-methylcytidine-3'-phosphorothioate
  modified_base 22: mod_base = OTHER; note = 2'-O-methyladenosine-3'-phosphorothioate
  modified_base 23: mod_base = OTHER; note = 2'-O-methyluridine
  misc_feature 1: note = RNA
  misc_feature 3..4: note = RNA
  misc_feature 6: note = RNA
  misc_feature 8..11: note = RNA
  misc_feature 13..23: note = RNA
  misc_feature 2: note = DNA
  misc_feature 5: note = DNA
  misc_feature 7: note = DNA
  misc_feature 12: note = DNA
tctacatcatttgtattctgcat

SEQ ID NO: 1093 - DNA, 23 bp, synthetic construct
  source 1..23: mol_type = other DNA
  modified_base 1: mod_base = OTHER; note = 2'-O-methyluridine-3'-phosphate 5'-(E)-Vinylphosphonate
  modified_base 2: mod_base = OTHER; note = 2'-deoxy-2'-fluorouridine-3'-phosphate
  modified_base 3: mod_base = OTHER; note = 2'-O-methylcytidine-3'-phosphate
  modified_base 4: mod_base = OTHER; note = 2'-O-methyluridine-3'-phosphate
  modified_base 6: mod_base = OTHER; note = 2'-O-methylcytidine-3'-phosphate
  modified_base 7: mod_base = OTHER; note = Adenosine-glycol nucleic acid (GNA), S-isomer
  modified_base 8: mod_base = OTHER; note = 2'-O-methyluridine-3'-phosphate
  modified_base 9: mod_base = OTHER; note = 2'-O-methylcytidine-3'-phosphate
  modified_base 10: mod_base = OTHER; note = 2'-O-methyladenosine-3'-phosphate
  modified_base 11: mod_base = OTHER; note = 2'-O-methyluridine-3'-phosphate
  modified_base 12: mod_base = OTHER; note = 2'-O-methyluridine-3'-phosphate
  modified_base 13: mod_base = OTHER; note = 2'-O-methyluridine-3'-phosphate
  modified_base 14: mod_base = OTHER; note = 2'-deoxy-2'-fluoroguanosine-3'-phosphate
  modified_base 15: mod_base = OTHER; note = 2'-O-methyluridine-3'-phosphate
  modified_base 16: mod_base = OTHER; note = 2'-deoxy-2'-fluoroadenosine-3'-phosphate
  modified_base 17: mod_base = OTHER; note = 2'-O-methyluridine-3'-phosphate
  modified_base 18: mod_base = OTHER; note = 2'-O-methyluridine-3'-phosphate
  modified_base 19: mod_base = OTHER; note = 2'-O-methylcytidine-3'-phosphate
  modified_base 20: mod_base = OTHER; note = 2'-O-methyluridine-3'-phosphate
  modified_base 21: mod_base = OTHER; note = 2'-O-methylguanosine-3'-phosphorothioate
  modified_base 22: mod_base = OTHER; note = 2'-O-methylcytidine-3'-phosphorothioate
  modified_base 23: mod_base = OTHER; note = 2'-O-methyladenosine
  misc_feature 1..4: note = RNA
  misc_feature 6..23: note = RNA
  misc_feature 5: note = DNA
ttctacatcatttgtattctgca

SEQ ID NO: 1094 - DNA, 23 bp, synthetic construct
  source 1..23: mol_type = other DNA
  modified_base 1: mod_base = OTHER; note = 2'-O-methyluridine-3'-phosphate 5'-(E)-Vinylphosphonate
  modified_base 3: mod_base = OTHER; note = 2'-O-methyladenosine-3'-phosphate
  modified_base 4: mod_base = OTHER; note = 2'-O-methylcytidine-3'-phosphate
  modified_base 6: mod_base = OTHER; note = 2'-O-methyladenosine-3'-phosphate
  modified_base 8: mod_base = OTHER; note = 2'-O-methylcytidine-3'-phosphate
  modified_base 9: mod_base = OTHER; note = 2'-O-methyluridine-3'-phosphate
  modified_base 10: mod_base = OTHER; note = 2'-O-methylguanosine-3'-phosphate
  modified_base 11: mod_base = OTHER; note = 2'-O-methyluridine-3'-phosphate
  modified_base 13: mod_base = OTHER; note = 2'-O-methyluridine-3'-phosphate
  modified_base 14: mod_base = OTHER; note = 2'-deoxy-2'-fluorocytidine-3'-phosphate
  modified_base 15: mod_base = OTHER; note = 2'-O-methyluridine-3'-phosphate
  modified_base 16: mod_base = OTHER; note = 2'-O-methyladenosine-3'-phosphate
  modified_base 17: mod_base = OTHER; note = 2'-O-methylcytidine-3'-phosphate
  modified_base 18: mod_base = OTHER; note = 2'-O-methyladenosine-3'-phosphate
  modified_base 19: mod_base = OTHER; note = 2'-O-methyluridine-3'-phosphate
  modified_base 20: mod_base = OTHER; note = 2'-O-methylcytidine-3'-phosphate
  modified_base 21: mod_base = OTHER; note = 2'-O-methyladenosine-3'-phosphorothioate
  modified_base 22: mod_base = OTHER; note = 2'-O-methyluridine-3'-phosphorothioate
  modified_base 23: mod_base = OTHER; note = 2'-O-methyluridine
  misc_feature 1: note = RNA
  misc_feature 3..4: note = RNA
  misc_feature 6: note = RNA
  misc_feature 8..11: note = RNA
  misc_feature 13..23: note = RNA
  misc_feature 2: note = DNA
  misc_feature 5: note = DNA
  misc_feature 7: note = DNA
  misc_feature 12: note = DNA
taacgagctgtttctacatcatt

SEQ ID NO: 1095 - DNA, 23 bp, synthetic construct
  source 1..23: mol_type = other DNA
  modified_base 1: mod_base = OTHER; note = 2'-O-methyluridine-3'-phosphate 5'-(E)-Vinylphosphonate
  modified_base 3: mod_base = OTHER; note = 2'-O-methyladenosine-3'-phosphate
  modified_base 4: mod_base = OTHER; note = 2'-O-methyladenosine-3'-phosphate
  modified_base 6: mod_base = OTHER; note = 2'-O-methylguanosine-3'-phosphate
  modified_base 8: mod_base = OTHER; note = 2'-O-methylguanosine-3'-phosphate
  modified_base 9: mod_base = OTHER; note = 2'-O-methylcytidine-3'-phosphate
  modified_base 10: mod_base = OTHER; note = 2'-O-methyluridine-3'-phosphate
  modified_base 11: mod_base = OTHER; note = 2'-O-methylguanosine-3'-phosphate
  modified_base 13: mod_base = OTHER; note = 2'-O-methyluridine-3'-phosphate
  modified_base 14: mod_base = OTHER; note = 2'-deoxy-2'-fluorouridine-3'-phosphate
  modified_base 15: mod_base = OTHER; note = 2'-O-methylcytidine-3'-phosphate
  modified_base 16: mod_base = OTHER; note = 2'-O-methyluridine-3'-phosphate
  modified_base 17: mod_base = OTHER; note = 2'-O-methyladenosine-3'-phosphate
  modified_base 18: mod_base = OTHER; note = 2'-O-methylcytidine-3'-phosphate
  modified_base 19: mod_base = OTHER; note = 2'-O-methyladenosine-3'-phosphate
  modified_base 20: mod_base = OTHER; note = 2'-O-methyluridine-3'-phosphate
  modified_base 21: mod_base = OTHER; note = 2'-O-methylcytidine-3'-phosphorothioate
  modified_base 22: mod_base = OTHER; note = 2'-O-methyladenosine-3'-phosphorothioate
  modified_base 23: mod_base = OTHER; note = 2'-O-methyluridine
  misc_feature 1: note = RNA
  misc_feature 3..4: note = RNA
  misc_feature 6: note = RNA
  misc_feature 8..11: note = RNA
  misc_feature 13..23: note = RNA
  misc_feature 2: note = DNA
  misc_feature 5: note = DNA
  misc_feature 7: note = DNA
  misc_feature 12: note = DNA
tcaacgagctgtttctacatcat

SEQ ID NO: 1096 - DNA, 23 bp, synthetic construct
  source 1..23: mol_type = other DNA
  modified_base 1: mod_base = OTHER; note = 2'-O-methyluridine-3'-phosphate 5'-(E)-Vinylphosphonate
  modified_base 3: mod_base = OTHER; note = 2'-O-methyladenosine-3'-phosphate
  modified_base 4: mod_base = OTHER; note = 2'-O-methylguanosine-3'-phosphate
  modified_base 6: mod_base = OTHER; note = 2'-O-methylcytidine-3'-phosphate
  modified_base 8: mod_base = OTHER; note = 2'-O-methyluridine-3'-phosphate
  modified_base 9: mod_base = OTHER; note = 2'-O-methyladenosine-3'-phosphate
  modified_base 10: mod_base = OTHER; note = 2'-O-methyladenosine-3'-phosphate
  modified_base 11: mod_base = OTHER; note = 2'-O-methyladenosine-3'-phosphate
  modified_base 13: mod_base = OTHER; note = 2'-O-methyladenosine-3'-phosphate
  modified_base 14: mod_base = OTHER; note = 2'-deoxy-2'-fluorouridine-3'-phosphate
  modified_base 15: mod_base = OTHER; note = 2'-O-methylguanosine-3'-phosphate
  modified_base 16: mod_base = OTHER; note = 2'-O-methylguanosine-3'-phosphate
  modified_base 17: mod_base = OTHER; note = 2'-O-methylcytidine-3'-phosphate
  modified_base 18: mod_base = OTHER; note = 2'-O-methylcytidine-3'-phosphate
  modified_base 19: mod_base = OTHER; note = 2'-O-methyladenosine-3'-phosphate
  modified_base 20: mod_base = OTHER; note = 2'-O-methylguanosine-3'-phosphate
  modified_base 21: mod_base = OTHER; note = 2'-O-methyluridine-3'-phosphorothioate
  modified_base 22: mod_base = OTHER; note = 2'-O-methyladenosine-3'-phosphorothioate
  modified_base 23: mod_base = OTHER; note = 2'-O-methyladenosine
  misc_feature 1: note = RNA
  misc_feature 3..4: note = RNA
  misc_feature 6: note = RNA
  misc_feature 8..11: note = RNA
  misc_feature 13..23: note = RNA
  misc_feature 2: note = DNA
  misc_feature 5: note = DNA
  misc_feature 7: note = DNA
  misc_feature 12: note = DNA
tcagacttaaagatggccagtaa

SEQ ID NO: 1097 - DNA, 23 bp, synthetic construct
  source 1..23: mol_type = other DNA
  modified_base 1: mod_base = OTHER; note = 2'-O-methyluridine-3'-phosphate 5'-(E)-Vinylphosphonate
  modified_base 3: mod_base = OTHER; note = 2'-O-methylcytidine-3'-phosphate
  modified_base 4: mod_base = OTHER; note = 2'-O-methyladenosine-3'-phosphate
  modified_base 6: mod_base = OTHER; note = 2'-O-methyladenosine-3'-phosphate
  modified_base 8: mod_base = OTHER; note = 2'-O-methyluridine-3'-phosphate
  modified_base 9: mod_base = OTHER; note = 2'-O-methyluridine-3'-phosphate
  modified_base 10: mod_base = OTHER; note = 2'-O-methyladenosine-3'-phosphate
  modified_base 11: mod_base = OTHER; note = 2'-O-methyladenosine-3'-phosphate
  modified_base 13: mod_base = OTHER; note = 2'-O-methylguanosine-3'-phosphate
  modified_base 14: mod_base = OTHER; note = 2'-deoxy-2'-fluoroadenosine-3'-phosphate
  modified_base 15: mod_base = OTHER; note = 2'-O-methyluridine-3'-phosphate
  modified_base 16: mod_base = OTHER; note = 2'-O-methylguanosine-3'-phosphate
  modified_base 17: mod_base = OTHER; note = 2'-O-methylguanosine-3'-phosphate
  modified_base 18: mod_base = OTHER; note = 2'-O-methylcytidine-3'-phosphate
  modified_base 19: mod_base = OTHER; note = 2'-O-methylcytidine-3'-phosphate
  modified_base 20: mod_base = OTHER; note = 2'-O-methyladenosine-3'-phosphate
  modified_base 21: mod_base = OTHER; note = 2'-O-methylguanosine-3'-phosphorothioate
  modified_base 22: mod_base = OTHER; note = 2'-O-methyluridine-3'-phosphorothioate
  modified_base 23: mod_base = OTHER; note = 2'-O-methyladenosine
  misc_feature 1: note = RNA
  misc_feature 3..4: note = RNA
  misc_feature 6: note = RNA
  misc_feature 8..11: note = RNA
  misc_feature 13..23: note = RNA
  misc_feature 2: note = DNA
  misc_feature 5: note = DNA
  misc_feature 7: note = DNA
  misc_feature 12: note = DNA
tccagacttaaagatggccagta

SEQ ID NO: 1098 - DNA, 23 bp, synthetic construct
  source 1..23: mol_type = other DNA
  modified_base 1: mod_base = OTHER; note = 2'-O-methyluridine-3'-phosphate 5'-(E)-Vinylphosphonate
  modified_base 2: mod_base = OTHER; note = 2'-deoxy-2'-fluorouridine-3'-phosphate
  modified_base 3: mod_base = OTHER; note = 2'-O-methylcytidine-3'-phosphate
  modified_base 4: mod_base = OTHER; note = 2'-O-methylcytidine-3'-phosphate
  modified_base 6: mod_base = OTHER; note = 2'-O-methylguanosine-3'-phosphate
  modified_base 7: mod_base = OTHER; note = Adenosine-glycol nucleic acid (GNA), S-isomer
  modified_base 8: mod_base = OTHER; note = 2'-O-methylcytidine-3'-phosphate
  modified_base 9: mod_base = OTHER; note = 2'-O-methyluridine-3'-phosphate
  modified_base 10: mod_base = OTHER; note = 2'-O-methyluridine-3'-phosphate
  modified_base 11: mod_base = OTHER; note = 2'-O-methyladenosine-3'-phosphate
  modified_base 12: mod_base = OTHER; note = 2'-O-methyladenosine-3'-phosphate
  modified_base 13: mod_base = OTHER; note = 2'-O-methyladenosine-3'-phosphate
  modified_base 14: mod_base = OTHER; note = 2'-deoxy-2'-fluoroguanosine-3'-phosphate
  modified_base 15: mod_base = OTHER; note = 2'-O-methyladenosine-3'-phosphate
  modified_base 16: mod_base = OTHER; note = 2'-deoxy-2'-fluorouridine-3'-phosphate
  modified_base 17: mod_base = OTHER; note = 2'-O-methylguanosine-3'-phosphate
  modified_base 18: mod_base = OTHER; note = 2'-O-methylguanosine-3'-phosphate
  modified_base 19: mod_base = OTHER; note = 2'-O-methylcytidine-3'-phosphate
  modified_base 20: mod_base = OTHER; note = 2'-O-methylcytidine-3'-phosphate
  modified_base 21: mod_base = OTHER; note = 2'-O-methyladenosine-3'-phosphorothioate
  modified_base 22: mod_base = OTHER; note = 2'-O-methylguanosine-3'-phosphorothioate
  modified_base 23: mod_base = OTHER; note = 2'-O-methyluridine
  misc_feature 1..4: note = RNA
  misc_feature 6..23: note = RNA
  misc_feature 5: note = DNA
ttccagacttaaagatggccagt

SEQ ID NO: 1099 - DNA, 23 bp, synthetic construct
  source 1..23: mol_type = other DNA
  modified_base 1: mod_base = OTHER; note = 2'-O-methyluridine-3'-phosphate 5'-(E)-Vinylphosphonate
  modified_base 3: mod_base = OTHER; note = 2'-O-methyluridine-3'-phosphate
  modified_base 4: mod_base = OTHER; note = 2'-O-methylcytidine-3'-phosphate
  modified_base 6: mod_base = OTHER; note = 2'-O-methyladenosine-3'-phosphate
  modified_base 8: mod_base = OTHER; note = 2'-O-methyladenosine-3'-phosphate
  modified_base 9: mod_base = OTHER; note = 2'-O-methylcytidine-3'-phosphate
  modified_base 10: mod_base = OTHER; note = 2'-O-methyluridine-3'-phosphate
  modified_base 11: mod_base = OTHER; note = 2'-O-methyluridine-3'-phosphate
  modified_base 13: mod_base = OTHER; note = 2'-O-methyladenosine-3'-phosphate
  modified_base 14: mod_base = OTHER; note = 2'-deoxy-2'-fluoroadenosine-3'-phosphate
  modified_base 15: mod_base = OTHER; note = 2'-O-methylguanosine-3'-phosphate
  modified_base 16: mod_base = OTHER; note = 2'-O-methyladenosine-3'-phosphate
  modified_base 17: mod_base = OTHER; note = 2'-O-methyluridine-3'-phosphate
  modified_base 18: mod_base = OTHER; note = 2'-O-methylguanosine-3'-phosphate
  modified_base 19: mod_base = OTHER; note = 2'-O-methylguanosine-3'-phosphate
  modified_base 20: mod_base = OTHER; note = 2'-O-methylcytidine-3'-phosphate
  modified_base 21: mod_base = OTHER; note = 2'-O-methylcytidine-3'-phosphorothioate
  modified_base 22: mod_base = OTHER; note = 2'-O-methyladenosine-3'-phosphorothioate
  modified_base 23: mod_base = OTHER; note = 2'-O-methylguanosine
  misc_feature 1: note = RNA
  misc_feature 3..4: note = RNA
  misc_feature 6: note = RNA
  misc_feature 8..11: note = RNA
  misc_feature 13..23: note = RNA
  misc_feature 2: note = DNA
  misc_feature 5: note = DNA
  misc_feature 7: note = DNA
  misc_feature 12: note = DNA
tctccagacttaaagatggccag

SEQ ID NO: 1100 - DNA, 23 bp, synthetic construct
  source 1..23: mol_type = other DNA
  modified_base 1: mod_base = OTHER; note = 2'-O-methyluridine-3'-phosphate 5'-(E)-Vinylphosphonate
  modified_base 3: mod_base = OTHER; note = 2'-O-methylcytidine-3'-phosphate
  modified_base 4: mod_base = OTHER; note = 2'-O-methyluridine-3'-phosphate
  modified_base 6: mod_base = OTHER; note = 2'-O-methylcytidine-3'-phosphate
  modified_base 8: mod_base = OTHER; note = 2'-O-methylguanosine-3'-phosphate
  modified_base 9: mod_base = OTHER; note = 2'-O-methyladenosine-3'-phosphate
  modified_base 10: mod_base = OTHER; note = 2'-O-methylcytidine-3'-phosphate
  modified_base 11: mod_base = OTHER; note = 2'-O-methyluridine-3'-phosphate
  modified_base 13: mod_base = OTHER; note = 2'-O-methyladenosine-3'-phosphate
  modified_base 14: mod_base = OTHER; note = 2'-deoxy-2'-fluoroadenosine-3'-phosphate
  modified_base 15: mod_base = OTHER; note = 2'-O-methyladenosine-3'-phosphate
  modified_base 16: mod_base = OTHER; note = 2'-O-methylguanosine-3'-phosphate
  modified_base 17: mod_base = OTHER; note = 2'-O-methyladenosine-3'-phosphate
  modified_base 18: mod_base = OTHER; note = 2'-O-methyluridine-3'-phosphate
  modified_base 19: mod_base = OTHER; note = 2'-O-methylguanosine-3'-phosphate
  modified_base 20: mod_base = OTHER; note = 2'-O-methylguanosine-3'-phosphate
  modified_base 21: mod_base = OTHER; note = 2'-O-methylcytidine-3'-phosphorothioate
  modified_base 22: mod_base = OTHER; note = 2'-O-methylcytidine-3'-phosphorothioate
  modified_base 23: mod_base = OTHER; note = 2'-O-methyladenosine
  misc_feature 1: note = RNA
  misc_feature 3..4: note = RNA
  misc_feature 6: note = RNA
  misc_feature 8..11: note = RNA
  misc_feature 13..23: note = RNA
  misc_feature 2: note = DNA
  misc_feature 5: note = DNA
  misc_feature 7: note = DNA
  misc_feature 12: note = DNA
tcctccagacttaaagatggcca

SEQ ID NO: 1101 - DNA, 23 bp, synthetic construct
  source 1..23: mol_type = other DNA
  modified_base 1: mod_base = OTHER; note = 2'-O-methyluridine-3'-phosphate 5'-(E)-Vinylphosphonate
  modified_base 3: mod_base = OTHER; note = 2'-O-methyladenosine-3'-phosphate
  modified_base 4: mod_base = OTHER; note = 2'-O-methylguanosine-3'-phosphate
  modified_base 6: mod_base = OTHER; note = 2'-O-methyladenosine-3'-phosphate
  modified_base 8: mod_base = OTHER; note = 2'-O-methylcytidine-3'-phosphate
  modified_base 9: mod_base = OTHER; note = 2'-O-methylcytidine-3'-phosphate
  modified_base 10: mod_base = OTHER; note = 2'-O-methyladenosine-3'-phosphate
  modified_base 11: mod_base = OTHER; note = 2'-O-methylcytidine-3'-phosphate
  modified_base 13: mod_base = OTHER; note = 2'-O-methylguanosine-3'-phosphate
  modified_base 14: mod_base = OTHER; note = 2'-deoxy-2'-fluoroguanosine-3'-phosphate
  modified_base 15: mod_base = OTHER; note = 2'-O-methyluridine-3'-phosphate
  modified_base 16: mod_base = OTHER; note = 2'-O-methylguanosine-3'-phosphate
  modified_base 17: mod_base = OTHER; note = 2'-O-methyladenosine-3'-phosphate
  modified_base 18: mod_base = OTHER; note = 2'-O-methyladenosine-3'-phosphate
  modified_base 19: mod_base = OTHER; note = 2'-O-methylcytidine-3'-phosphate
  modified_base 20: mod_base = OTHER; note = 2'-O-methylcytidine-3'-phosphate
  modified_base 21: mod_base = OTHER; note = 2'-O-methyladenosine-3'-phosphorothioate
  modified_base 22: mod_base = OTHER; note = 2'-O-methyladenosine-3'-phosphorothioate
  modified_base 23: mod_base = OTHER; note = 2'-O-methylguanosine
  misc_feature 1: note = RNA
  misc_feature 3..4: note = RNA
  misc_feature 6: note = RNA
  misc_feature 8..11: note = RNA
  misc_feature 13..23: note = RNA
  misc_feature 2: note = DNA
  misc_feature 5: note = DNA
  misc_feature 7: note = DNA
  misc_feature 12: note = DNA
tcagaatccactggtgaaccaag

SEQ ID NO: 1102 - DNA, 23 bp, synthetic construct
  source 1..23: mol_type = other DNA
  modified_base 1: mod_base = OTHER; note = 2'-O-methyluridine-3'-phosphate 5'-(E)-Vinylphosphonate
  modified_base 3: mod_base = OTHER; note = 2'-O-methylcytidine-3'-phosphate
  modified_base 4: mod_base = OTHER; note = 2'-O-methyladenosine-3'-phosphate
  modified_base 6: mod_base = OTHER; note = 2'-O-methylcytidine-3'-phosphate
  modified_base 8: mod_base = OTHER; note = 2'-O-methylcytidine-3'-phosphate
  modified_base 9: mod_base = OTHER; note = 2'-O-methyladenosine-3'-phosphate
  modified_base 10: mod_base = OTHER; note = 2'-O-methylguanosine-3'-phosphate
  modified_base 11: mod_base = OTHER; note = 2'-O-methyladenosine-3'-phosphate
  modified_base 13: mod_base = OTHER; note = 2'-O-methyluridine-3'-phosphate
  modified_base 14: mod_base = OTHER; note = 2'-deoxy-2'-fluorocytidine-3'-phosphate
  modified_base 15: mod_base = OTHER; note = 2'-O-methylcytidine-3'-phosphate
  modified_base 16: mod_base = OTHER; note = 2'-O-methyladenosine-3'-phosphate
  modified_base 17: mod_base = OTHER; note = 2'-O-methylcytidine-3'-phosphate
  modified_base 18: mod_base = OTHER; note = 2'-O-methyluridine-3'-phosphate
  modified_base 19: mod_base = OTHER; note = 2'-O-methylguanosine-3'-phosphate
  modified_base 20: mod_base = OTHER; note = 2'-O-methylguanosine-3'-phosphate
  modified_base 21: mod_base = OTHER; note = 2'-O-methyluridine-3'-phosphorothioate
  modified_base 22: mod_base = OTHER; note = 2'-O-methylguanosine-3'-phosphorothioate
  modified_base 23: mod_base = OTHER; note = 2'-O-methyladenosine
  misc_feature 1: note = RNA
  misc_feature 3..4: note = RNA
  misc_feature 6: note = RNA
  misc_feature 8..11: note = RNA
  misc_feature 13..23: note = RNA
  misc_feature 2: note = DNA
  misc_feature 5: note = DNA
  misc_feature 7: note = DNA
  misc_feature 12: note = DNA
tacaacacagaatccactggtga

SEQ ID NO: 1103 - DNA, 23 bp, synthetic construct
  source 1..23: mol_type = other DNA
  modified_base 1: mod_base = OTHER; note = 2'-O-methyluridine-3'-phosphate 5'-(E)-Vinylphosphonate
  modified_base 2: mod_base = OTHER; note = 2'-deoxy-2'-fluorocytidine-3'-phosphate
  modified_base 3: mod_base = OTHER; note = 2'-O-methylcytidine-3'-phosphate
  modified_base 4: mod_base = OTHER; note = 2'-O-methyladenosine-3'-phosphate
  modified_base 6: mod_base = OTHER; note = 2'-O-methylcytidine-3'-phosphate
  modified_base 7: mod_base = OTHER; note = Thymidine-glycol nucleic acid (GNA), S-Isomer
  modified_base 8: mod_base = OTHER; note = 2'-O-methyladenosine-3'-phosphate
  modified_base 9: mod_base = OTHER; note = 2'-O-methyladenosine-3'-phosphate
  modified_base 10: mod_base = OTHER; note = 2'-O-methyladenosine-3'-phosphate
  modified_base 11: mod_base = OTHER; note = 2'-O-methylcytidine-3'-phosphate
  modified_base 12: mod_base = OTHER; note = 2'-O-methylguanosine-3'-phosphate
  modified_base 13: mod_base = OTHER; note = 2'-O-methylcytidine-3'-phosphate
  modified_base 14: mod_base = OTHER; note = 2'-deoxy-2'-fluoroadenosine-3'-phosphate
  modified_base 15: mod_base = OTHER; note = 2'-O-methylcytidine-3'-phosphate
  modified_base 16: mod_base = OTHER; note = 2'-deoxy-2'-fluorouridine-3'-phosphate
  modified_base 17: mod_base = OTHER; note = 2'-O-methylguanosine-3'-phosphate
  modified_base 18: mod_base = OTHER; note = 2'-O-methylcytidine-3'-phosphate
  modified_base 19: mod_base = OTHER; note = 2'-O-methylcytidine-3'-phosphate
  modified_base 20: mod_base = OTHER; note = 2'-O-methyladenosine-3'-phosphate
  modified_base 21: mod_base = OTHER; note = 2'-O-methyluridine-3'-phosphorothioate
  modified_base 22: mod_base = OTHER; note = 2'-O-methyluridine-3'-phosphorothioate
  modified_base 23: mod_base = OTHER; note = 2'-O-methyluridine
  misc_feature 1..4: note = RNA
  misc_feature 6..23: note = RNA
  misc_feature 5: note = DNA
tccagctaaacgcactgccattt

SEQ ID NO: 1104 - DNA, 23 bp, synthetic construct
  source 1..23: mol_type = other DNA
  modified_base 1: mod_base = OTHER; note = 2'-O-methyluridine-3'-phosphate 5'-(E)-Vinylphosphonate
  modified_base 3: mod_base = OTHER; note = 2'-O-methylcytidine-3'-phosphate
  modified_base 4: mod_base = OTHER; note = 2'-O-methyladenosine-3'-phosphate
  modified_base 6: mod_base = OTHER; note = 2'-O-methylcytidine-3'-phosphate
  modified_base 8: mod_base = OTHER; note = 2'-O-methyladenosine-3'-phosphate
  modified_base 9: mod_base = OTHER; note = 2'-O-methyladenosine-3'-phosphate
  modified_base 10: mod_base = OTHER; note = 2'-O-methyladenosine-3'-phosphate
  modified_base 11: mod_base = OTHER; note = 2'-O-methylcytidine-3'-phosphate
  modified_base 13: mod_base = OTHER; note = 2'-O-methylcytidine-3'-phosphate
  modified_base 14: mod_base = OTHER; note = 2'-deoxy-2'-fluoroadenosine-3'-phosphate
  modified_base 15: mod_base = OTHER; note = 2'-O-methylcytidine-3'-phosphate
  modified_base 16: mod_base = OTHER; note = 2'-O-methyluridine-3'-phosphate
  modified_base 17: mod_base = OTHER; note = 2'-O-methylguanosine-3'-phosphate
  modified_base 18: mod_base = OTHER; note = 2'-O-methylcytidine-3'-phosphate
  modified_base 19: mod_base = OTHER; note = 2'-O-methylcytidine-3'-phosphate
  modified_base 20: mod_base = OTHER; note = 2'-O-methyladenosine-3'-phosphate
  modified_base 21: mod_base = OTHER; note = 2'-O-methyluridine-3'-phosphorothioate
  modified_base 22: mod_base = OTHER; note = 2'-O-methyluridine-3'-phosphorothioate
  modified_base 23: mod_base = OTHER; note = 2'-O-methyluridine
  misc_feature 1: note = RNA
  misc_feature 3..4: note = RNA
  misc_feature 6: note = RNA
  misc_feature 8..11: note = RNA
  misc_feature 13..23: note = RNA
  misc_feature 2: note = DNA
  misc_feature 5: note = DNA
  misc_feature 7: note = DNA
  misc_feature 12: note = DNA
tccagctaaacgcactgccattt

SEQ ID NO: 1105 - DNA, 23 bp, synthetic construct
  source 1..23: mol_type = other DNA
  modified_base 1: mod_base = OTHER; note = 2'-O-methyluridine-3'-phosphate 5'-(E)-Vinylphosphonate
  modified_base 2: mod_base = OTHER; note = 2'-deoxy-2'-fluorouridine-3'-phosphate
  modified_base 3: mod_base = OTHER; note = 2'-O-methylguanosine-3'-phosphate
  modified_base 4: mod_base = OTHER; note = 2'-O-methyluridine-3'-phosphate
  modified_base 6: mod_base = OTHER; note = 2'-O-methyluridine-3'-phosphate
  modified_base 7: mod_base = OTHER; note = Thymidine-glycol nucleic acid (GNA), S-Isomer
  modified_base 8: mod_base = OTHER; note = 2'-O-methylguanosine-3'-phosphate
  modified_base 9: mod_base = OTHER; note = 2'-O-methyluridine-3'-phosphate
  modified_base 10: mod_base = OTHER; note = 2'-O-methyluridine-3'-phosphate
  modified_base 11: mod_base = OTHER; note = 2'-O-methylguanosine-3'-phosphate
  modified_base 12: mod_base = OTHER; note = 2'-O-methyladenosine-3'-phosphate
  modified_base 13: mod_base = OTHER; note = 2'-O-methylguanosine-3'-phosphate
  modified_base 14: mod_base = OTHER; note = 2'-deoxy-2'-fluorocytidine-3'-phosphate
  modified_base 15: mod_base = OTHER; note = 2'-O-methyladenosine-3'-phosphate
  modified_base 16: mod_base = OTHER; note = 2'-deoxy-2'-fluoroadenosine-3'-phosphate
  modified_base 17: mod_base = OTHER; note = 2'-O-methylguanosine-3'-phosphate
  modified_base 18: mod_base = OTHER; note = 2'-O-methylguanosine-3'-phosphate
  modified_base 19: mod_base = OTHER; note = 2'-O-methylcytidine-3'-phosphate
  modified_base 20: mod_base = OTHER; note = 2'-O-methyladenosine-3'-phosphate
  modified_base 21: mod_base = OTHER; note = 2'-O-methyladenosine-3'-phosphorothioate
  modified_base 22: mod_base = OTHER; note = 2'-O-methylcytidine-3'-phosphorothioate
  modified_base 23: mod_base = OTHER; note = 2'-O-methylcytidine
  misc_feature 1..4: note = RNA
  misc_feature 6..23: note = RNA
  misc_feature 5: note = DNA
ttgttttgttgagcaaggcaacc

SEQ ID NO: 1106 - DNA, 23 bp, synthetic construct
  source 1..23: mol_type = other DNA
  modified_base 1: mod_base = OTHER; note = 2'-O-methyluridine-3'-phosphate 5'-(E)-Vinylphosphonate
  modified_base 3: mod_base = OTHER; note = 2'-O-methyluridine-3'-phosphate
  modified_base 4: mod_base = OTHER; note = 2'-O-methylguanosine-3'-phosphate
  modified_base 6: mod_base = OTHER; note = 2'-O-methyluridine-3'-phosphate
  modified_base 8: mod_base = OTHER; note = 2'-O-methyluridine-3'-phosphate
  modified_base 9: mod_base = OTHER; note = 2'-O-methylguanosine-3'-phosphate
  modified_base 10: mod_base = OTHER; note = 2'-O-methyluridine-3'-phosphate
  modified_base 11: mod_base = OTHER; note = 2'-O-methyluridine-3'-phosphate
  modified_base 13: mod_base = OTHER; note = 2'-O-methyladenosine-3'-phosphate
  modified_base 14: mod_base = OTHER; note = 2'-deoxy-2'-fluoroguanosine-3'-phosphate
  modified_base 15: mod_base = OTHER; note = 2'-O-methylcytidine-3'-phosphate
  modified_base 16: mod_base = OTHER; note = 2'-O-methyladenosine-3'-phosphate
  modified_base 17: mod_base = OTHER; note = 2'-O-methyladenosine-3'-phosphate
  modified_base 18: mod_base = OTHER; note = 2'-O-methylguanosine-3'-phosphate
  modified_base 19: mod_base = OTHER; note = 2'-O-methylguanosine-3'-phosphate
  modified_base 20: mod_base = OTHER; note = 2'-O-methylcytidine-3'-phosphate
  modified_base 21: mod_base = OTHER; note = 2'-O-methyladenosine-3'-phosphorothioate
  modified_base 22: mod_base = OTHER; note = 2'-O-methyladenosine-3'-phosphorothioate
  modified_base 23: mod_base = OTHER; note = 2'-O-methylcytidine
  misc_feature 1: note = RNA
  misc_feature 3..4: note = RNA
  misc_feature 6: note = RNA
  misc_feature 8..11: note = RNA
  misc_feature 13..23: note = RNA
  misc_feature 2: note = DNA
  misc_feature 5: note = DNA
  misc_feature 7: note = DNA
  misc_feature 12: note = DNA
tttgttttgttgagcaaggcaac

SEQ ID NO: 1107 - DNA, 23 bp, synthetic construct
  source 1..23: mol_type = other DNA
  modified_base 1: mod_base = OTHER; note = 2'-O-methyluridine-3'-phosphate 5'-(E)-Vinylphosphonate
  modified_base 2: mod_base = OTHER; note = 2'-deoxy-2'-fluorouridine-3'-phosphate
  modified_base 3: mod_base = OTHER; note = 2'-O-methyluridine-3'-phosphate
  modified_base 4: mod_base = OTHER; note = 2'-O-methylguanosine-3'-phosphate
  modified_base 6: mod_base = OTHER; note = 2'-O-methyluridine-3'-phosphate
  modified_base 7: mod_base = OTHER; note = Thymidine-glycol nucleic acid (GNA), S-Isomer
  modified_base 8: mod_base = OTHER; note = 2'-O-methyluridine-3'-phosphate
  modified_base 9: mod_base = OTHER; note = 2'-O-methylguanosine-3'-phosphate
  modified_base 10: mod_base = OTHER; note = 2'-O-methyluridine-3'-phosphate
  modified_base 11: mod_base = OTHER; note = 2'-O-methyluridine-3'-phosphate
  modified_base 12: mod_base = OTHER; note = 2'-O-methylguanosine-3'-phosphate
  modified_base 13: mod_base = OTHER; note = 2'-O-methyladenosine-3'-phosphate
  modified_base 14: mod_base = OTHER; note = 2'-deoxy-2'-fluoroguanosine-3'-phosphate
  modified_base 15: mod_base = OTHER; note = 2'-O-methylcytidine-3'-phosphate
  modified_base 16: mod_base = OTHER; note = 2'-deoxy-2'-fluoroadenosine-3'-phosphate
  modified_base 17: mod_base = OTHER; note = 2'-O-methyladenosine-3'-phosphate
  modified_base 18: mod_base = OTHER; note = 2'-O-methylguanosine-3'-phosphate
  modified_base 19: mod_base = OTHER; note = 2'-O-methylguanosine-3'-phosphate
  modified_base 20: mod_base = OTHER; note = 2'-O-methylcytidine-3'-phosphate
  modified_base 21: mod_base = OTHER; note = 2'-O-methyladenosine-3'-phosphorothioate
  modified_base 22: mod_base = OTHER; note = 2'-O-methyladenosine-3'-phosphorothioate
  modified_base 23: mod_base = OTHER; note = 2'-O-methylcytidine
  misc_feature 1..4: note = RNA
  misc_feature 6..23: note = RNA
  misc_feature 5: note = DNA
tttgttttgttgagcaaggcaac

SEQ ID NO: 1108 - DNA, 23 bp, synthetic construct
  source 1..23: mol_type = other DNA
  modified_base 1: mod_base = OTHER; note = 2'-O-methyluridine-3'-phosphate 5'-(E)-Vinylphosphonate
  modified_base 2: mod_base = OTHER; note = 2'-deoxy-2'-fluorouridine-3'-phosphate
  modified_base 3: mod_base = OTHER; note = 2'-O-methyluridine-3'-phosphate
  modified_base 4: mod_base = OTHER; note = 2'-O-methyluridine-3'-phosphate
  modified_base 6: mod_base = OTHER; note = 2'-O-methyluridine-3'-phosphate
  modified_base 7: mod_base = OTHER; note = Thymidine-glycol nucleic acid (GNA), S-Isomer
  modified_base 8: mod_base = OTHER; note = 2'-O-methyluridine-3'-phosphate
  modified_base 9: mod_base = OTHER; note = 2'-O-methyluridine-3'-phosphate
  modified_base 10: mod_base = OTHER; note = 2'-O-methylguanosine-3'-phosphate
  modified_base 11: mod_base = OTHER; note = 2'-O-methyluridine-3'-phosphate
  modified_base 12: mod_base = OTHER; note = 2'-O-methyluridine-3'-phosphate
  modified_base 13: mod_base = OTHER; note = 2'-O-methylguanosine-3'-phosphate
  modified_base 14: mod_base = OTHER; note = 2'-deoxy-2'-fluoroadenosine-3'-phosphate
  modified_base 15: mod_base = OTHER; note = 2'-O-methylguanosine-3'-phosphate
  modified_base 16: mod_base = OTHER; note = 2'-deoxy-2'-fluorocytidine-3'-phosphate
  modified_base 17: mod_base = OTHER; note = 2'-O-methyladenosine-3'-phosphate
  modified_base 18: mod_base = OTHER; note = 2'-O-methyladenosine-3'-phosphate
  modified_base 19: mod_base = OTHER; note = 2'-O-methylguanosine-3'-phosphate
  modified_base 20: mod_base = OTHER; note = 2'-O-methylguanosine-3'-phosphate
  modified_base 21: mod_base = OTHER; note = 2'-O-methylcytidine-3'-phosphorothioate
  modified_base 22: mod_base = OTHER; note = 2'-O-methyladenosine-3'-phosphorothioate
  modified_base 23: mod_base = OTHER; note = 2'-O-methyladenosine
  misc_feature 1..4: note = RNA
  misc_feature 6..23: note = RNA
  misc_feature 5: note = DNA
ttttgttttgttgagcaaggcaa

SEQ ID NO: 1109 - DNA, 23 bp, synthetic construct
  source 1..23: mol_type = other DNA
  modified_base 1: mod_base = OTHER; note = 2'-O-methyluridine-3'-phosphate 5'-(E)-Vinylphosphonate
  modified_base 3: mod_base = OTHER; note = 2'-O-methylguanosine-3'-phosphate
  modified_base 4: mod_base = OTHER; note = 2'-O-methyluridine-3'-phosphate
  modified_base 6: mod_base = OTHER; note = 2'-O-methyladenosine-3'-phosphate
  modified_base 8: mod_base = OTHER; note = 2'-O-methyladenosine-3'-phosphate
  modified_base 9: mod_base = OTHER; note = 2'-O-methylguanosine-3'-phosphate
  modified_base 10: mod_base = OTHER; note = 2'-O-methylcytidine-3'-phosphate
  modified_base 11: mod_base = OTHER; note = 2'-O-methylcytidine-3'-phosphate
  modified_base 13: mod_base = OTHER; note = 2'-O-methyladenosine-3'-phosphate
  modified_base 14: mod_base = OTHER; note = 2'-deoxy-2'-fluoroguanosine-3'-phosphate
  modified_base 15: mod_base = OTHER; note = 2'-O-methyladenosine-3'-phosphate
  modified_base 16: mod_base = OTHER; note = 2'-O-methyladenosine-3'-phosphate
  modified_base 17: mod_base = OTHER; note = 2'-O-methyluridine-3'-phosphate
  modified_base 18: mod_base = OTHER; note = 2'-O-methyluridine-3'-phosphate
  modified_base 19: mod_base = OTHER; note = 2'-O-methyluridine-3'-phosphate
  modified_base 20: mod_base = OTHER; note = 2'-O-methyladenosine-3'-phosphate
  modified_base 21: mod_base = OTHER; note = 2'-O-methyladenosine-3'-phosphorothioate
  modified_base 22: mod_base = OTHER; note = 2'-O-methylcytidine-3'-phosphorothioate
  modified_base 23: mod_base = OTHER; note = 2'-O-methyladenosine
  misc_feature 1: note = RNA
  misc_feature 3..4: note = RNA
  misc_feature 6: note = RNA
  misc_feature 8..11: note = RNA
  misc_feature 13..23: note = RNA
  misc_feature 2: note = DNA
  misc_feature 5: note = DNA
  misc_feature 7: note = DNA
  misc_feature 12: note = DNA
tcgtaatagccaagaatttaaca

SEQ ID NO: 1110 - DNA, 23 bp, synthetic construct
  source 1..23: mol_type = other DNA
  modified_base 1: mod_base = OTHER; note = 2'-O-methyluridine-3'-phosphate 5'-(E)-Vinylphosphonate
  modified_base 3: mod_base = OTHER; note = 2'-O-methyluridine-3'-phosphate
  modified_base 4: mod_base = OTHER; note = 2'-O-methylguanosine-3'-phosphate
  modified_base 6: mod_base = OTHER; note = 2'-O-methylcytidine-3'-phosphate
  modified_base 8: mod_base = OTHER; note = 2'-O-methyluridine-3'-phosphate
  modified_base 9: mod_base = OTHER; note = 2'-O-methyladenosine-3'-phosphate
  modified_base 10: mod_base = OTHER; note = 2'-O-methyladenosine-3'-phosphate
  modified_base 11: mod_base = OTHER; note = 2'-O-methyluridine-3'-phosphate
  modified_base 13: mod_base = OTHER; note = 2'-O-methylguanosine-3'-phosphate
  modified_base 14: mod_base = OTHER; note = 2'-deoxy-2'-fluorocytidine-3'-phosphate
  modified_base 15: mod_base = OTHER; note = 2'-O-methylcytidine-3'-phosphate
  modified_base 16: mod_base = OTHER; note = 2'-O-methyladenosine-3'-phosphate
  modified_base 17: mod_base = OTHER; note = 2'-O-methyladenosine-3'-phosphate
  modified_base 18: mod_base = OTHER; note = 2'-O-methylguanosine-3'-phosphate
  modified_base 19: mod_base = OTHER; note = 2'-O-methyladenosine-3'-phosphate
  modified_base 20: mod_base = OTHER; note = 2'-O-methyladenosine-3'-phosphate
  modified_base 21: mod_base = OTHER; note = 2'-O-methyluridine-3'-phosphorothioate
  modified_base 22: mod_base = OTHER; note = 2'-O-methyluridine-3'-phosphorothioate
  modified_base 23: mod_base = OTHER; note = 2'-O-methyluridine
  misc_feature 1: note = RNA
  misc_feature 3..4: note = RNA
  misc_feature 6: note = RNA
  misc_feature 8..11: note = RNA
  misc_feature 13..23: note = RNA
  misc_feature 2: note = DNA
  misc_feature 5: note = DNA
  misc_feature 7: note = DNA
  misc_feature 12: note = DNA
tctgtcgtaatagccaagaattt

SEQ ID NO: 1111 - DNA, 23 bp, synthetic construct
  source 1..23: mol_type = other DNA
  modified_base 1: mod_base = OTHER; note = 2'-O-methyluridine-3'-phosphate 5'-(E)-Vinylphosphonate
  modified_base 2: mod_base = OTHER; note = 2'-deoxy-2'-fluoroguanosine-3'-phosphate
  modified_base 3: mod_base = OTHER; note = 2'-O-methylguanosine-3'-phosphate
  modified_base 4: mod_base = OTHER; note = 2'-O-methylcytidine-3'-phosphate
  modified_base 6: mod_base = OTHER; note = 2'-O-methylguanosine-3'-phosphate
  modified_base 7: mod_base = OTHER; note = Thymidine-glycol nucleic acid (GNA), S-Isomer
  modified_base 8: mod_base = OTHER; note = 2'-O-methylcytidine-3'-phosphate
  modified_base 9: mod_base = OTHER; note = 2'-O-methyluridine-3'-phosphate
  modified_base 10: mod_base = OTHER; note = 2'-O-methylguanosine-3'-phosphate
  modified_base 11: mod_base = OTHER; note = 2'-O-methyluridine-3'-phosphate
  modified_base 12: mod_base = OTHER; note = 2'-O-methylcytidine-3'-phosphate
  modified_base 13: mod_base = OTHER; note = 2'-O-methylguanosine-3'-phosphate
  modified_base 14: mod_base = OTHER; note = 2'-deoxy-2'-fluorouridine-3'-phosphate
  modified_base 15: mod_base = OTHER; note = 2'-O-methyladenosine-3'-phosphate
  modified_base 16: mod_base = OTHER; note = 2'-deoxy-2'-fluoroadenosine-3'-phosphate
  modified_base 17: mod_base = OTHER; note = 2'-O-methyluridine-3'-phosphate
  modified_base 18: mod_base = OTHER; note = 2'-O-methyladenosine-3'-phosphate
  modified_base 19: mod_base = OTHER; note = 2'-O-methylguanosine-3'-phosphate
  modified_base 20: mod_base = OTHER; note = 2'-O-methylcytidine-3'-phosphate
  modified_base 21: mod_base = OTHER; note = 2'-O-methylcytidine-3'-phosphorothioate
  modified_base 22: mod_base = OTHER; note = 2'-O-methyladenosine-3'-phosphorothioate
  modified_base 23: mod_base = OTHER; note = 2'-O-methyladenosine
  misc_feature 1..4: note = RNA
  misc_feature 6..23: note = RNA
  misc_feature 5: note = DNA
tggcagtctgtcgtaatagccaa

SEQ ID NO: 1112 - DNA, 23 bp, synthetic construct
  source 1..23: mol_type = other DNA
  modified_base 1: mod_base = OTHER; note = 2'-O-methyluridine-3'-phosphate 5'-(E)-Vinylphosphonate
  modified_base 2: mod_base = OTHER; note = 2'-deoxy-2'-fluorouridine-3'-phosphate
  modified_base 3: mod_base = OTHER; note = 2'-O-methyluridine-3'-phosphate
  modified_base 4: mod_base = OTHER; note = 2'-O-methyluridine-3'-phosphate
  modified_base 6: mod_base = OTHER; note = 2'-O-methyladenosine-3'-phosphate
  modified_base 7: mod_base = OTHER; note = Adenosine-glycol nucleic acid (GNA), S-isomer
  modified_base 8: mod_base = OTHER; note = 2'-O-methylguanosine-3'-phosphate
  modified_base 9: mod_base = OTHER; note = 2'-O-methylguanosine-3'-phosphate
  modified_base 10: mod_base = OTHER; note = 2'-O-methylcytidine-3'-phosphate
  modified_base 11: mod_base = OTHER; note = 2'-O-methyladenosine-3'-phosphate
  modified_base 12: mod_base = OTHER; note = 2'-O-methylguanosine-3'-phosphate
  modified_base 13: mod_base = OTHER; note = 2'-O-methyluridine-3'-phosphate
  modified_base 14: mod_base = OTHER; note = 2'-deoxy-2'-fluorocytidine-3'-phosphate
  modified_base 15: mod_base = OTHER; note = 2'-O-methyluridine-3'-phosphate
  modified_base 16: mod_base = OTHER; note = 2'-deoxy-2'-fluoroguanosine-3'-phosphate
  modified_base 17: mod_base = OTHER; note = 2'-O-methyluridine-3'-phosphate
  modified_base 18: mod_base = OTHER; note = 2'-O-methylcytidine-3'-phosphate
  modified_base 19: mod_base = OTHER; note = 2'-O-methylguanosine-3'-phosphate
  modified_base 20: mod_base = OTHER; note = 2'-O-methyluridine-3'-phosphate
  modified_base 21: mod_base = OTHER; note = 2'-O-methyladenosine-3'-phosphorothioate
  modified_base 22: mod_base = OTHER; note = 2'-O-methyladenosine-3'-phosphorothioate
  modified_base 23: mod_base = OTHER; note = 2'-O-methyluridine
  misc_feature 1..4: note = RNA
  misc_feature 6..23: note = RNA
  misc_feature 5: note = DNA
ttttgaaggcagtctgtcgtaat

SEQ ID NO: 1113 - DNA, 23 bp, synthetic construct
  source 1..23: mol_type = other DNA
  modified_base 1: mod_base = OTHER; note = 2'-O-methyluridine-3'-phosphate 5'-(E)-Vinylphosphonate
  modified_base 3: mod_base = OTHER; note = 2'-O-methylcytidine-3'-phosphate
  modified_base 4: mod_base = OTHER; note = 2'-O-methyluridine-3'-phosphate
  modified_base 6: mod_base = OTHER; note = 2'-O-methyladenosine-3'-phosphate
  modified_base 8: mod_base = OTHER; note = 2'-O-methyluridine-3'-phosphate
  modified_base 9: mod_base = OTHER; note = 2'-O-methyladenosine-3'-phosphate
  modified_base 10: mod_base = OTHER; note = 2'-O-methyluridine-3'-phosphate
  modified_base 11: mod_base = OTHER; note = 2'-O-methyladenosine-3'-phosphate
  modified_base 13: mod_base = OTHER; note = 2'-O-methyluridine-3'-phosphate
  modified_base 14: mod_base = OTHER; note = 2'-deoxy-2'-fluorouridine-3'-phosphate
  modified_base 15: mod_base = OTHER; note = 2'-O-methyladenosine-3'-phosphate
  modified_base 16: mod_base = OTHER; note = 2'-O-methylcytidine-3'-phosphate
  modified_base 17: mod_base = OTHER; note = 2'-O-methyluridine-3'-phosphate
  modified_base 18: mod_base = OTHER; note = 2'-O-methyladenosine-3'-phosphate
  modified_base 19: mod_base = OTHER; note = 2'-O-methyladenosine-3'-phosphate
  modified_base 20: mod_base = OTHER; note = 2'-O-methyladenosine-3'-phosphate
  modified_base 21: mod_base = OTHER; note = 2'-O-methylguanosine-3'-phosphorothioate
  modified_base 22: mod_base = OTHER; note = 2'-O-methylcytidine-3'-phosphorothioate
  modified_base 23: mod_base = OTHER; note = 2'-O-methyluridine
  misc_feature 1: note = RNA
  misc_feature 3..4: note = RNA
  misc_feature 6: note = RNA
  misc_feature 8..11: note = RNA
  misc_feature 13..23: note = RNA
  misc_feature 2: note = DNA
  misc_feature 5: note = DNA
  misc_feature 7: note = DNA
  misc_feature 12: note = DNA
tcctcattatatttactaaagct

SEQ ID NO: 1114 - DNA, 23 bp, synthetic construct
  source 1..23: mol_type = other DNA
  modified_base 1: mod_base = OTHER; note = 2'-O-methyluridine-3'-phosphate 5'-(E)-Vinylphosphonate
  modified_base 3: mod_base = OTHER; note = 2'-O-methyladenosine-3'-phosphate
  modified_base 4: mod_base = OTHER; note = 2'-O-methylguanosine-3'-phosphate
  modified_base 6: mod_base = OTHER; note = 2'-O-methyladenosine-3'-phosphate
  modified_base 8: mod_base = OTHER; note = 2'-O-methyladenosine-3'-phosphate
  modified_base 9: mod_base = OTHER; note = 2'-O-methylguanosine-3'-phosphate
  modified_base 10: mod_base = OTHER; note = 2'-O-methylguanosine-3'-phosphate
  modified_base 11: mod_base = OTHER; note = 2'-O-methyluridine-3'-phosphate
  modified_base 13: mod_base = OTHER; note = 2'-O-methylcytidine-3'-phosphate
  modified_base 14: mod_base = OTHER; note = 2'-deoxy-2'-fluorouridine-3'-phosphate
  modified_base 15: mod_base = OTHER; note = 2'-O-methylcytidine-3'-phosphate
  modified_base 16: mod_base = OTHER; note = 2'-O-methyladenosine-3'-phosphate
  modified_base 17: mod_base = OTHER; note = 2'-O-methyluridine-3'-phosphate
  modified_base 18: mod_base = OTHER; note = 2'-O-methyluridine-3'-phosphate
  modified_base 19: mod_base = OTHER; note = 2'-O-methyladenosine-3'-phosphate
  modified_base 20: mod_base = OTHER; note = 2'-O-methyluridine-3'-phosphate
  modified_base 21: mod_base = OTHER; note = 2'-O-methyladenosine-3'-phosphorothioate
  modified_base 22: mod_base = OTHER; note = 2'-O-methyluridine-3'-phosphorothioate
  modified_base 23: mod_base = OTHER; note = 2'-O-methyluridine
  misc_feature 1: note = RNA
  misc_feature 3..4: note = RNA
  misc_feature 6: note = RNA
  misc_feature 8..11: note = RNA
  misc_feature 13..23: note = RNA
  misc_feature 2: note = DNA
  misc_feature 5: note = DNA
  misc_feature 7: note = DNA
  misc_feature 12: note = DNA
taagtataggtcctcattatatt

SEQ ID NO: 1115 - DNA, 23 bp, synthetic construct
  source 1..23: mol_type = other DNA
  modified_base 1: mod_base = OTHER; note = 2'-O-methyluridine-3'-phosphate 5'-(E)-Vinylphosphonate
  modified_base 2: mod_base = OTHER; note = 2'-deoxy-2'-fluoroadenosine-3'-phosphate
  modified_base 3: mod_base = OTHER; note = 2'-O-methyladenosine-3'-phosphate
  modified_base 4: mod_base = OTHER; note = 2'-O-methylguanosine-3'-phosphate
  modified_base 6: mod_base = OTHER; note = 2'-O-methyluridine-3'-phosphate
  modified_base 7: mod_base = OTHER; note = Thymidine-glycol nucleic acid (GNA), S-Isomer
  modified_base 8: mod_base = OTHER; note = 2'-O-methylguanosine-3'-phosphate
  modified_base 9: mod_base = OTHER; note = 2'-O-methylcytidine-3'-phosphate
  modified_base 10: mod_base = OTHER; note = 2'-O-methyladenosine-3'-phosphate
  modified_base 11: mod_base = OTHER; note = 2'-O-methyluridine-3'-phosphate
  modified_base 12: mod_base = OTHER; note = 2'-O-methyluridine-3'-phosphate
  modified_base 13: mod_base = OTHER; note = 2'-O-methylcytidine-3'-phosphate
  modified_base 14: mod_base = OTHER; note = 2'-deoxy-2'-fluorocytidine-3'-phosphate
  modified_base 15: mod_base = OTHER; note = 2'-O-methyladenosine-3'-phosphate
  modified_base 16: mod_base = OTHER; note = 2'-deoxy-2'-fluorocytidine-3'-phosphate
  modified_base 17: mod_base = OTHER; note = 2'-O-methylcytidine-3'-phosphate
  modified_base 18: mod_base = OTHER; note = 2'-O-methyladenosine-3'-phosphate
  modified_base 19: mod_base = OTHER; note = 2'-O-methylguanosine-3'-phosphate
  modified_base 20: mod_base = OTHER; note = 2'-O-methylcytidine-3'-phosphate
  modified_base 21: mod_base = OTHER; note = 2'-O-methyluridine-3'-phosphorothioate
  modified_base 22: mod_base = OTHER; note = 2'-O-methyluridine-3'-phosphorothioate
  modified_base 23: mod_base = OTHER; note = 2'-O-methylcytidine
  misc_feature 1..4: note = RNA
  misc_feature 6..23: note = RNA
  misc_feature 5: note = DNA
taagcttgcattccaccagcttc

SEQ ID NO: 1116 - DNA, 23 bp, synthetic construct
  source 1..23: mol_type = other DNA
  modified_base 1: mod_base = OTHER; note = 2'-O-methyluridine-3'-phosphate 5'-(E)-Vinylphosphonate
  modified_base 3: mod_base = OTHER; note = 2'-O-methyladenosine-3'-phosphate
  modified_base 4: mod_base = OTHER; note = 2'-O-methylguanosine-3'-phosphate
  modified_base 6: mod_base = OTHER; note = 2'-O-methylcytidine-3'-phosphate
  modified_base 8: mod_base = OTHER; note = 2'-O-methyluridine-3'-phosphate
  modified_base 9: mod_base = OTHER; note = 2'-O-methyluridine-3'-phosphate
  modified_base 10: mod_base = OTHER; note = 2'-O-methylguanosine-3'-phosphate
  modified_base 11: mod_base = OTHER; note = 2'-O-methyladenosine-3'-phosphate
  modified_base 13: mod_base = OTHER; note = 2'-O-methyluridine-3'-phosphate
  modified_base 14: mod_base = OTHER; note = 2'-deoxy-2'-fluorouridine-3'-phosphate
  modified_base 15: mod_base = OTHER; note = 2'-O-methylguanosine-3'-phosphate
  modified_base 16: mod_base = OTHER; note = 2'-O-methylguanosine-3'-phosphate
  modified_base 17: mod_base = OTHER; note = 2'-O-methyladenosine-3'-phosphate
  modified_base 18: mod_base = OTHER; note = 2'-O-methyluridine-3'-phosphate
  modified_base 19: mod_base = OTHER; note = 2'-O-methylcytidine-3'-phosphate
  modified_base 20: mod_base = OTHER; note = 2'-O-methyluridine-3'-phosphate
  modified_base 21: mod_base = OTHER; note = 2'-O-methylguanosine-3'-phosphorothioate
  modified_base 22: mod_base = OTHER; note = 2'-O-methyluridine-3'-phosphorothioate
  modified_base 23: mod_base = OTHER; note = 2'-O-methylcytidine
  misc_feature 1: note = RNA
  misc_feature 3..4: note = RNA
  misc_feature 6: note = RNA
  misc_feature 8..11: note = RNA
  misc_feature 13..23: note = RNA
  misc_feature 2: note = DNA
  misc_feature 5: note = DNA
  misc_feature 7: note = DNA
  misc_feature 12: note = DNA
taagacgttgacttggatctgtc

SEQ ID NO: 1117 - DNA, 23 bp, synthetic construct
  source 1..23: mol_type = other DNA
  modified_base 1: mod_base = OTHER; note = 2'-O-methyluridine-3'-phosphate 5'-(E)-Vinylphosphonate
  modified_base 2: mod_base = OTHER; note = 2'-deoxy-2'-fluorouridine-3'-phosphate
  modified_base 3: mod_base = OTHER; note = 2'-O-methylguanosine-3'-phosphate
  modified_base 4: mod_base = OTHER; note = 2'-O-methyladenosine-3'-phosphate
  modified_base 6: mod_base = OTHER; note = 2'-O-methylcytidine-3'-phosphate
  modified_base 7: mod_base = OTHER; note = Adenosine-glycol nucleic acid (GNA), S-isomer
  modified_base 8: mod_base = OTHER; note = 2'-O-methyladenosine-3'-phosphate
  modified_base 9: mod_base = OTHER; note = 2'-O-methylguanosine-3'-phosphate
  modified_base 10: mod_base = OTHER; note = 2'-O-methyladenosine-3'-phosphate
  modified_base 11: mod_base = OTHER; note = 2'-O-methylcytidine-3'-phosphate
  modified_base 12: mod_base = OTHER; note = 2'-O-methylguanosine-3'-phosphate
  modified_base 13: mod_base = OTHER; note = 2'-O-methyluridine-3'-phosphate
  modified_base 14: mod_base = OTHER; note = 2'-deoxy-2'-fluorouridine-3'-phosphate
  modified_base 15: mod_base = OTHER; note = 2'-O-methylguanosine-3'-phosphate
  modified_base 16: mod_base = OTHER; note = 2'-deoxy-2'-fluoroadenosine-3'-phosphate
  modified_base 17: mod_base = OTHER; note = 2'-O-methylcytidine-3'-phosphate
  modified_base 18: mod_base = OTHER; note = 2'-O-methyluridine-3'-phosphate
  modified_base 19: mod_base = OTHER; note = 2'-O-methyluridine-3'-phosphate
  modified_base 20: mod_base = OTHER; note = 2'-O-methylguanosine-3'-phosphate
  modified_base 21: mod_base = OTHER; note = 2'-O-methylguanosine-3'-phosphorothioate
  modified_base 22: mod_base = OTHER; note = 2'-O-methyladenosine-3'-phosphorothioate
  modified_base 23: mod_base = OTHER; note = 2'-O-methyluridine
  misc_feature 1..4: note = RNA
  misc_feature 6..23: note = RNA
  misc_feature 5: note = DNA
ttgaacaagacgttgacttggat

SEQ ID NO: 1118 - DNA, 23 bp, synthetic construct
  source 1..23: mol_type = other DNA
  modified_base 1: mod_base = OTHER; note = 2'-O-methyluridine-3'-phosphate 5'-(E)-Vinylphosphonate
  modified_base 3: mod_base = OTHER; note = 2'-O-methylguanosine-3'-phosphate
  modified_base 4: mod_base = OTHER; note = 2'-O-methyladenosine-3'-phosphate
  modified_base 6: mod_base = OTHER; note = 2'-O-methylcytidine-3'-phosphate
  modified_base 8: mod_base = OTHER; note = 2'-O-methyladenosine-3'-phosphate
  modified_base 9: mod_base = OTHER; note = 2'-O-methylguanosine-3'-phosphate
  modified_base 10: mod_base = OTHER; note = 2'-O-methyladenosine-3'-phosphate
  modified_base 11: mod_base = OTHER; note = 2'-O-methylcytidine-3'-phosphate
  modified_base 13: mod_base = OTHER; note = 2'-O-methyluridine-3'-phosphate
  modified_base 14: mod_base = OTHER; note = 2'-deoxy-2'-fluorouridine-3'-phosphate
  modified_base 15: mod_base = OTHER; note = 2'-O-methylguanosine-3'-phosphate
  modified_base 16: mod_base = OTHER; note = 2'-O-methyladenosine-3'-phosphate
  modified_base 17: mod_base = OTHER; note = 2'-O-methylcytidine-3'-phosphate
  modified_base 18: mod_base = OTHER; note = 2'-O-methyluridine-3'-phosphate
  modified_base 19: mod_base = OTHER; note = 2'-O-methyluridine-3'-phosphate
  modified_base 20: mod_base = OTHER; note = 2'-O-methylguanosine-3'-phosphate
  modified_base 21: mod_base = OTHER; note = 2'-O-methylguanosine-3'-phosphorothioate
  modified_base 22: mod_base = OTHER; note = 2'-O-methyladenosine-3'-phosphorothioate
  modified_base 23: mod_base = OTHER; note = 2'-O-methyluridine
  misc_feature 1: note = RNA
  misc_feature 3..4: note = RNA
  misc_feature 6: note = RNA
  misc_feature 8..11: note = RNA
  misc_feature 13..23: note = RNA
  misc_feature 2: note = DNA
  misc_feature 5: note = DNA
  misc_feature 7: note = DNA
  misc_feature 12: note = DNA
ttgaacaagacgttgacttggat

SEQ ID NO: 1119 - DNA, 23 bp, synthetic construct
  source 1..23: mol_type = other DNA
  modified_base 1: mod_base = OTHER; note = 2'-O-methyluridine-3'-phosphate 5'-(E)-Vinylphosphonate
  modified_base 2: mod_base = OTHER; note = 2'-deoxy-2'-fluoroguanosine-3'-phosphate
  modified_base 3: mod_base = OTHER; note = 2'-O-methyladenosine-3'-phosphate
  modified_base 4: mod_base = OTHER; note = 2'-O-methylguanosine-3'-phosphate
  modified_base 6: mod_base = OTHER; note = 2'-O-methylguanosine-3'-phosphate
  modified_base 7: mod_base = OTHER; note = Thymidine-glycol nucleic acid (GNA), S-Isomer
  modified_base 8: mod_base = OTHER; note = 2'-O-methylcytidine-3'-phosphate
  modified_base 9: mod_base = OTHER; note = 2'-O-methylcytidine-3'-phosphate
  modified_base 10: mod_base = OTHER; note = 2'-O-methyladenosine-3'-phosphate
  modified_base 11: mod_base = OTHER; note = 2'-O-methyladenosine-3'-phosphate
  modified_base 12: mod_base = OTHER; note = 2'-O-methyladenosine-3'-phosphate
  modified_base 13: mod_base = OTHER; note = 2'-O-methylguanosine-3'-phosphate
  modified_base 14: mod_base = OTHER; note = 2'-deoxy-2'-fluoroadenosine-3'-phosphate
  modified_base 15: mod_base = OTHER; note = 2'-O-methylcytidine-3'-phosphate
  modified_base 16: mod_base = OTHER; note = 2'-deoxy-2'-fluoroadenosine-3'-phosphate
  modified_base 17: mod_base = OTHER; note = 2'-O-methylguanosine-3'-phosphate
  modified_base 18: mod_base = OTHER; note = 2'-O-methyluridine-3'-phosphate
  modified_base 19: mod_base = OTHER; note = 2'-O-methyluridine-3'-phosphate
  modified_base 20: mod_base = OTHER; note = 2'-O-methylcytidine-3'-phosphate
  modified_base 21: mod_base = OTHER; note = 2'-O-methyluridine-3'-phosphorothioate
  modified_base 22: mod_base = OTHER; note = 2'-O-methylguanosine-3'-phosphorothioate
  modified_base 23: mod_base = OTHER; note = 2'-O-methyladenosine
  misc_feature 1..4: note = RNA
  misc_feature 6..23: note = RNA
  misc_feature 5: note = DNA
tgagagtccaaagacagttctga

SEQ ID NO: 1120 - DNA, 23 bp, synthetic construct
  source 1..23: mol_type = other DNA
  modified_base 1: mod_base = OTHER; note = 2'-O-methyluridine-3'-phosphate 5'-(E)-Vinylphosphonate
  modified_base 2: mod_base = OTHER; note = 2'-deoxy-2'-fluorouridine-3'-phosphate
  modified_base 3: mod_base = OTHER; note = 2'-O-methyluridine-3'-phosphate
  modified_base 4: mod_base = OTHER; note = 2'-O-methyladenosine-3'-phosphate
  modified_base 6: mod_base = OTHER; note = 2'-O-methyluridine-3'-phosphate
  modified_base 7: mod_base = OTHER; note = Thymidine-glycol nucleic acid (GNA), S-Isomer
  modified_base 8: mod_base = OTHER; note = 2'-O-methylguanosine-3'-phosphate
  modified_base 9: mod_base = OTHER; note = 2'-O-methylcytidine-3'-phosphate
  modified_base 10: mod_base = OTHER; note = 2'-O-methyladenosine-3'-phosphate
  modified_base 11: mod_base = OTHER; note = 2'-O-methylguanosine-3'-phosphate
  modified_base 12: mod_base = OTHER; note = 2'-O-methylcytidine-3'-phosphate
  modified_base 13: mod_base = OTHER; note = 2'-O-methyladenosine-3'-phosphate
  modified_base 14: mod_base = OTHER; note = 2'-deoxy-2'-fluorouridine-3'-phosphate
  modified_base 15: mod_base = OTHER; note = 2'-O-methylcytidine-3'-phosphate
  modified_base 16: mod_base = OTHER; note = 2'-deoxy-2'-fluorouridine-3'-phosphate
  modified_base 17: mod_base = OTHER; note = 2'-O-methylguanosine-3'-phosphate
  modified_base 18: mod_base = OTHER; note = 2'-O-methyladenosine-3'-phosphate
  modified_base 19: mod_base = OTHER; note = 2'-O-methyladenosine-3'-phosphate
  modified_base 20: mod_base = OTHER; note = 2'-O-methyladenosine-3'-phosphate
  modified_base 21: mod_base = OTHER; note = 2'-O-methylguanosine-3'-phosphorothioate
  modified_base 22: mod_base = OTHER; note = 2'-O-methyladenosine-3'-phosphorothioate
  modified_base 23: mod_base = OTHER; note = 2'-O-methyluridine
  misc_feature 1..4: note = RNA
  misc_feature 6..23: note = RNA
  misc_feature 5: note = DNA
tttagttgcagcatctgaaagat

SEQ ID NO: 1121 - DNA, 23 bp, synthetic construct
  source 1..23: mol_type = other DNA
  modified_base 1: mod_base = OTHER; note = 2'-O-methyluridine-3'-phosphate 5'-(E)-Vinylphosphonate
  modified_base 2: mod_base = OTHER; note = 2'-deoxy-2'-fluorouridine-3'-phosphate
  modified_base 3: mod_base = OTHER; note = 2'-O-methylguanosine-3'-phosphate
  modified_base 4: mod_base = OTHER; note = 2'-O-methyluridine-3'-phosphate
  modified_base 6: mod_base = OTHER; note = 2'-O-methyluridine-3'-phosphate
  modified_base 7: mod_base = OTHER; note = Adenosine-glycol nucleic acid (GNA), S-isomer
  modified_base 8: mod_base = OTHER; note = 2'-O-methylguanosine-3'-phosphate
  modified_base 9: mod_base = OTHER; note = 2'-O-methyluridine-3'-phosphate
  modified_base 10: mod_base = OTHER; note = 2'-O-methyluridine-3'-phosphate
  modified_base 11: mod_base = OTHER; note = 2'-O-methylguanosine-3'-phosphate
  modified_base 12: mod_base = OTHER; note = 2'-O-methylcytidine-3'-phosphate
  modified_base 13: mod_base = OTHER; note = 2'-O-methyladenosine-3'-phosphate
  modified_base 14: mod_base = OTHER; note = 2'-deoxy-2'-fluoroguanosine-3'-phosphate
  modified_base 15: mod_base = OTHER; note = 2'-O-methylcytidine-3'-phosphate
  modified_base 16: mod_base = OTHER; note = 2'-deoxy-2'-fluoroadenosine-3'-phosphate
  modified_base 17: mod_base = OTHER; note = 2'-O-methyluridine-3'-phosphate
  modified_base 18: mod_base = OTHER; note = 2'-O-methylcytidine-3'-phosphate
  modified_base 19: mod_base = OTHER; note = 2'-O-methyluridine-3'-phosphate
  modified_base 20: mod_base = OTHER; note = 2'-O-methylguanosine-3'-phosphate
  modified_base 21: mod_base = OTHER; note = 2'-O-methyladenosine-3'-phosphorothioate
  modified_base 22: mod_base = OTHER; note = 2'-O-methyladenosine-3'-phosphorothioate
  modified_base 23: mod_base = OTHER; note = 2'-O-methyladenosine
  misc_feature 1..4: note = RNA
  misc_feature 6..23: note = RNA
  misc_feature 5: note = DNA
ttgtttagttgcagcatctgaaa

SEQ ID NO: 1122 - DNA, 23 bp, synthetic construct
  source 1..23: mol_type = other DNA
  modified_base 1: mod_base = OTHER; note = 2'-O-methyluridine-3'-phosphate 5'-(E)-Vinylphosphonate
  modified_base 2: mod_base = OTHER; note = 2'-deoxy-2'-fluorouridine-3'-phosphate
  modified_base 3: mod_base = OTHER; note = 2'-O-methylcytidine-3'-phosphate
  modified_base 4: mod_base = OTHER; note = 2'-O-methylcytidine-3'-phosphate
  modified_base 6: mod_base = OTHER; note = 2'-O-methylguanosine-3'-phosphate
  modified_base 7: mod_base = OTHER; note = Thymidine-glycol nucleic acid (GNA), S-Isomer
  modified_base 8: mod_base = OTHER; note = 2'-O-methyluridine-3'-phosphate
  modified_base 9: mod_base = OTHER; note = 2'-O-methyluridine-3'-phosphate
  modified_base 10: mod_base = OTHER; note = 2'-O-methyladenosine-3'-phosphate
  modified_base 11: mod_base = OTHER; note = 2'-O-methylguanosine-3'-phosphate
  modified_base 12: mod_base = OTHER; note = 2'-O-methyluridine-3'-phosphate
  modified_base 13: mod_base = OTHER; note = 2'-O-methyluridine-3'-phosphate
  modified_base 14: mod_base = OTHER; note = 2'-deoxy-2'-fluoroguanosine-3'-phosphate
  modified_base 15: mod_base = OTHER; note = 2'-O-methylcytidine-3'-phosphate
  modified_base 16: mod_base = OTHER; note = 2'-deoxy-2'-fluoroadenosine-3'-phosphate
  modified_base 17: mod_base = OTHER; note = 2'-O-methylguanosine-3'-phosphate
  modified_base 18: mod_base = OTHER; note = 2'-O-methylcytidine-3'-phosphate
  modified_base 19: mod_base = OTHER; note = 2'-O-methyladenosine-3'-phosphate
  modified_base 20: mod_base = OTHER; note = 2'-O-methyluridine-3'-phosphate
  modified_base 21: mod_base = OTHER; note = 2'-O-methylcytidine-3'-phosphorothioate
  modified_base 22: mod_base = OTHER; note = 2'-O-methyluridine-3'-phosphorothioate
  modified_base 23: mod_base = OTHER; note = 2'-O-methylguanosine
  misc_feature 1..4: note = RNA
  misc_feature 6..23: note = RNA
  misc_feature 5: note = DNA
ttcctgtttagttgcagcatctg

SEQ ID NO: 1123 - DNA, 23 bp, synthetic construct
  source 1..23: mol_type = other DNA
  modified_base 1: mod_base = OTHER; note = 2'-O-methyluridine-3'-phosphate 5'-(E)-Vinylphosphonate
  modified_base 3: mod_base = OTHER; note = 2'-O-methylcytidine-3'-phosphate
  modified_base 4: mod_base = OTHER; note = 2'-O-methylcytidine-3'-phosphate
  modified_base 6: mod_base = OTHER; note = 2'-O-methyluridine-3'-phosphate
  modified_base 8: mod_base = OTHER; note = 2'-O-methylcytidine-3'-phosphate
  modified_base 9: mod_base = OTHER; note = 2'-O-methyluridine-3'-phosphate
  modified_base 10: mod_base = OTHER; note = 2'-O-methylguanosine-3'-phosphate
  modified_base 11: mod_base = OTHER; note = 2'-O-methyluridine-3'-phosphate
  modified_base 13: mod_base = OTHER; note = 2'-O-methyluridine-3'-phosphate
  modified_base 14: mod_base = OTHER; note = 2'-deoxy-2'-fluoroadenosine-3'-phosphate
  modified_base 15: mod_base = OTHER; note = 2'-O-methylguanosine-3'-phosphate
  modified_base 16: mod_base = OTHER; note = 2'-O-methyluridine-3'-phosphate
  modified_base 17: mod_base = OTHER; note = 2'-O-methyluridine-3'-phosphate
  modified_base 18: mod_base = OTHER; note = 2'-O-methylguanosine-3'-phosphate
  modified_base 19: mod_base = OTHER; note = 2'-O-methylcytidine-3'-phosphate
  modified_base 20: mod_base = OTHER; note = 2'-O-methyladenosine-3'-phosphate
  modified_base 21: mod_base = OTHER; note = 2'-O-methylguanosine-3'-phosphorothioate
  modified_base 22: mod_base = OTHER; note = 2'-O-methylcytidine-3'-phosphorothioate
  modified_base 23: mod_base = OTHER; note = 2'-O-methyladenosine
  misc_feature 1: note = RNA
  misc_feature 3..4: note = RNA
  misc_feature 6: note = RNA
  misc_feature 8..11: note = RNA
  misc_feature 13..23: note = RNA
  misc_feature 2: note = DNA
  misc_feature 5: note = DNA
  misc_feature 7: note = DNA
  misc_feature 12: note = DNA
tcccttcctgtttagttgcagca

SEQ ID NO: 1124 - DNA, 23 bp, synthetic construct
  source 1..23: mol_type = other DNA
  modified_base 1: mod_base = OTHER; note = 2'-O-methyluridine-3'-phosphate 5'-(E)-Vinylphosphonate
  modified_base 2: mod_base = OTHER; note = 2'-deoxy-2'-fluoroadenosine-3'-phosphate
  modified_base 3: mod_base = OTHER; note = 2'-O-methylguanosine-3'-phosphate
  modified_base 4: mod_base = OTHER; note = 2'-O-methylguanosine-3'-phosphate
  modified_base 6: mod_base = OTHER; note = 2'-O-methylguanosine-3'-phosphate
  modified_base 7: mod_base = OTHER; note = Adenosine-glycol nucleic acid (GNA), S-isomer
  modified_base 8: mod_base = OTHER; note = 2'-O-methylcytidine-3'-phosphate
  modified_base 9: mod_base = OTHER; note = 2'-O-methylcytidine-3'-phosphate
  modified_base 10: mod_base = OTHER; note = 2'-O-methyluridine-3'-phosphate
  modified_base 11: mod_base = OTHER; note = 2'-O-methyluridine-3'-phosphate
  modified_base 12: mod_base = OTHER; note = 2'-O-methylcytidine-3'-phosphate
  modified_base 13: mod_base = OTHER; note = 2'-O-methylcytidine-3'-phosphate
  modified_base 14: mod_base = OTHER; note = 2'-deoxy-2'-fluoroadenosine-3'-phosphate
  modified_base 15: mod_base = OTHER; note = 2'-O-methyluridine-3'-phosphate
  modified_base 16: mod_base = OTHER; note = 2'-deoxy-2'-fluorocytidine-3'-phosphate
  modified_base 17: mod_base = OTHER; note = 2'-O-methylcytidine-3'-phosphate
  modified_base 18: mod_base = OTHER; note = 2'-O-methylcytidine-3'-phosphate
  modified_base 19: mod_base = OTHER; note = 2'-O-methyluridine-3'-phosphate
  modified_base 20: mod_base = OTHER; note = 2'-O-methyluridine-3'-phosphate
  modified_base 21: mod_base = OTHER; note = 2'-O-methylcytidine-3'-phosphorothioate
  modified_base 22: mod_base = OTHER; note = 2'-O-methylcytidine-3'-phosphorothioate
  modified_base 23: mod_base = OTHER; note = 2'-O-methyluridine
  misc_feature 1..4: note = RNA
  misc_feature 6..23: note = RNA
  misc_feature 5: note = DNA
taggagaccttccatcccttcct

SEQ ID NO: 1125 - DNA, 23 bp, synthetic construct
  source 1..23: mol_type = other DNA
  modified_base 1: mod_base = OTHER; note = 2'-O-methyluridine-3'-phosphate 5'-(E)-Vinylphosphonate
  modified_base 2: mod_base = OTHER; note = 2'-deoxy-2'-fluoroadenosine-3'-phosphate
  modified_base 3: mod_base = OTHER; note = 2'-O-methyluridine-3'-phosphate
  modified_base 4: mod_base = OTHER; note = 2'-O-methyladenosine-3'-phosphate
  modified_base 6: mod_base = OTHER; note = 2'-O-methylcytidine-3'-phosphate
  modified_base 7: mod_base = OTHER; note = Adenosine-glycol nucleic acid (GNA), S-isomer
  modified_base 8: mod_base = OTHER; note = 2'-O-methyluridine-3'-phosphate
  modified_base 9: mod_base = OTHER; note = 2'-O-methylcytidine-3'-phosphate
  modified_base 10: mod_base = OTHER; note = 2'-O-methyluridine-3'-phosphate
  modified_base 11: mod_base = OTHER; note = 2'-O-methylguanosine-3'-phosphate
  modified_base 12: mod_base = OTHER; note = 2'-O-methyladenosine-3'-phosphate
  modified_base 13: mod_base = OTHER; note = 2'-O-methyladenosine-3'-phosphate
  modified_base 14: mod_base = OTHER; note = 2'-deoxy-2'-fluorocytidine-3'-phosphate
  modified_base 15: mod_base = OTHER; note = 2'-O-methylcytidine-3'-phosphate
  modified_base 16: mod_base = OTHER; note = 2'-deoxy-2'-fluorocytidine-3'-phosphate
  modified_base 17: mod_base = OTHER; note = 2'-O-methyladenosine-3'-phosphate
  modified_base 18: mod_base = OTHER; note = 2'-O-methylguanosine-3'-phosphate
  modified_base 19: mod_base = OTHER; note = 2'-O-methyladenosine-3'-phosphate
  modified_base 20: mod_base = OTHER; note = 2'-O-methyladenosine-3'-phosphate
  modified_base 21: mod_base = OTHER; note = 2'-O-methylguanosine-3'-phosphorothioate
  modified_base 22: mod_base = OTHER; note = 2'-O-methylcytidine-3'-phosphorothioate
  modified_base 23: mod_base = OTHER; note = 2'-O-methyluridine
  misc_feature 1..4: note = RNA
  misc_feature 6..23: note = RNA
  misc_feature 5: note = DNA
tatatcatctgaacccagaagct

SEQ ID NO: 1126 - DNA, 23 bp, synthetic construct
  source 1..23: mol_type = other DNA
  modified_base 1: mod_base = OTHER; note = 2'-O-methyluridine-3'-phosphate 5'-(E)-Vinylphosphonate
  modified_base 3: mod_base = OTHER; note = 2'-O-methyladenosine-3'-phosphate
  modified_base 4: mod_base = OTHER; note = 2'-O-methylguanosine-3'-phosphate
  modified_base 6: mod_base = OTHER; note = 2'-O-methyladenosine-3'-phosphate
  modified_base 8: mod_base = OTHER; note = 2'-O-methyluridine-3'-phosphate
  modified_base 9: mod_base = OTHER; note = 2'-O-methylcytidine-3'-phosphate
  modified_base 10: mod_base = OTHER; note = 2'-O-methylcytidine-3'-phosphate
  modified_base 11: mod_base = OTHER; note = 2'-O-methyladenosine-3'-phosphate
  modified_base 13: mod_base = OTHER; note = 2'-O-methylcytidine-3'-phosphate
  modified_base 14: mod_base = OTHER; note = 2'-deoxy-2'-fluorouridine-3'-phosphate
  modified_base 15: mod_base = OTHER; note = 2'-O-methylguanosine-3'-phosphate
  modified_base 16: mod_base = OTHER; note = 2'-O-methylcytidine-3'-phosphate
  modified_base 17: mod_base = OTHER; note = 2'-O-methyladenosine-3'-phosphate
  modified_base 18: mod_base = OTHER; note = 2'-O-methylcytidine-3'-phosphate
  modified_base 19: mod_base = OTHER; note = 2'-O-methyladenosine-3'-phosphate
  modified_base 20: mod_base = OTHER; note = 2'-O-methylguanosine-3'-phosphate
  modified_base 21: mod_base = OTHER; note = 2'-O-methylguanosine-3'-phosphorothioate
  modified_base 22: mod_base = OTHER; note = 2'-O-methyluridine-3'-phosphorothioate
  modified_base 23: mod_base = OTHER; note = 2'-O-methylguanosine
  misc_feature 1: note = RNA
  misc_feature 3..4: note = RNA
  misc_feature 6: note = RNA
  misc_feature 8..11: note = RNA
  misc_feature 13..23: note = RNA
  misc_feature 2: note = DNA
  misc_feature 5: note = DNA
  misc_feature 7: note = DNA
  misc_feature 12: note = DNA
taagaattccagctgcacaggtg

SEQ ID NO: 1127 - DNA, 23 bp, synthetic construct
  source 1..23: mol_type = other DNA
  modified_base 1: mod_base = OTHER; note = 2'-O-methyluridine-3'-phosphate 5'-(E)-Vinylphosphonate
  modified_base 3: mod_base = OTHER; note = 2'-O-methyladenosine-3'-phosphate
  modified_base 4: mod_base = OTHER; note = 2'-O-methyladenosine-3'-phosphate
  modified_base 6: mod_base = OTHER; note = 2'-O-methylguanosine-3'-phosphate
  modified_base 8: mod_base = OTHER; note = 2'-O-methyladenosine-3'-phosphate
  modified_base 9: mod_base = OTHER; note = 2'-O-methyluridine-3'-phosphate
  modified_base 10: mod_base = OTHER; note = 2'-O-methyluridine-3'-phosphate
  modified_base 11: mod_base = OTHER; note = 2'-O-methylcytidine-3'-phosphate
  modified_base 13: mod_base = OTHER; note = 2'-O-methyladenosine-3'-phosphate
  modified_base 14: mod_base = OTHER; note = 2'-deoxy-2'-fluoroguanosine-3'-phosphate
  modified_base 15: mod_base = OTHER; note = 2'-O-methylcytidine-3'-phosphate
  modified_base 16: mod_base = OTHER; note = 2'-O-methyluridine-3'-phosphate
  modified_base 17: mod_base = OTHER; note = 2'-O-methylguanosine-3'-phosphate
  modified_base 18: mod_base = OTHER; note = 2'-O-methylcytidine-3'-phosphate
  modified_base 19: mod_base = OTHER; note = 2'-O-methyladenosine-3'-phosphate
  modified_base 20: mod_base = OTHER; note = 2'-O-methylcytidine-3'-phosphate
  modified_base 21: mod_base = OTHER; note = 2'-O-methyladenosine-3'-phosphorothioate
  modified_base 22: mod_base = OTHER; note = 2'-O-methylguanosine-3'-phosphorothioate
  modified_base 23: mod_base = OTHER; note = 2'-O-methylguanosine
  misc_feature 1: note = RNA
  misc_feature 3..4: note = RNA
  misc_feature 6: note = RNA
  misc_feature 8..11: note = RNA
  misc_feature 13..23: note = RNA
  misc_feature 2: note = DNA
  misc_feature 5: note = DNA
  misc_feature 7: note = DNA
  misc_feature 12: note = DNA
tgaaagaattccagctgcacagg

SEQ ID NO: 1128 - DNA, 23 bp, synthetic construct
  source 1..23: mol_type = other DNA
  modified_base 1: mod_base = OTHER; note = 2'-O-methyluridine-3'-phosphate 5'-(E)-Vinylphosphonate
  modified_base 2: mod_base = OTHER; note = 2'-deoxy-2'-fluoroadenosine-3'-phosphate
  modified_base 3: mod_base = OTHER; note = 2'-O-methyladenosine-3'-phosphate
  modified_base 4: mod_base = OTHER; note = 2'-O-methylguanosine-3'-phosphate
  modified_base 6: mod_base = OTHER; note = 2'-O-methylguanosine-3'-phosphate
  modified_base 7: mod_base = OTHER; note = Adenosine-glycol nucleic acid (GNA), S-isomer
  modified_base 8: mod_base = OTHER; note = 2'-O-methylguanosine-3'-phosphate
  modified_base 9: mod_base = OTHER; note = 2'-O-methylguanosine-3'-phosphate
  modified_base 10: mod_base = OTHER; note = 2'-O-methyluridine-3'-phosphate
  modified_base 11: mod_base = OTHER; note = 2'-O-methyluridine-3'-phosphate
  modified_base 12: mod_base = OTHER; note = 2'-O-methyladenosine-3'-phosphate
  modified_base 13: mod_base = OTHER; note = 2'-O-methylguanosine-3'-phosphate
  modified_base 14: mod_base = OTHER; note = 2'-deoxy-2'-fluoroadenosine-3'-phosphate
  modified_base 15: mod_base = OTHER; note = 2'-O-methyladenosine-3'-phosphate
  modified_base 16: mod_base = OTHER; note = 2'-deoxy-2'-fluoroadenosine-3'-phosphate
  modified_base 17: mod_base = OTHER; note = 2'-O-methylguanosine-3'-phosphate
  modified_base 18: mod_base = OTHER; note = 2'-O-methyladenosine-3'-phosphate
  modified_base 19: mod_base = OTHER; note = 2'-O-methyladenosine-3'-phosphate
  modified_base 20: mod_base = OTHER; note = 2'-O-methyluridine-3'-phosphate
  modified_base 21: mod_base = OTHER; note = 2'-O-methyluridine-3'-phosphorothioate
  modified_base 22: mod_base = OTHER; note = 2'-O-methylcytidine-3'-phosphorothioate
  modified_base 23: mod_base = OTHER; note = 2'-O-methylcytidine
  misc_feature 1..4: note = RNA
  misc_feature 6..23: note = RNA
  misc_feature 5: note = DNA
taagtgaggttagaaagaattcc

SEQ ID NO: 1129 - DNA, 23 bp, synthetic construct
  source 1..23: mol_type = other DNA
  modified_base 1: mod_base = OTHER; note = 2'-O-methyluridine-3'-phosphate 5'-(E)-Vinylphosphonate
  modified_base 3: mod_base = OTHER; note = 2'-O-methylcytidine-3'-phosphate
  modified_base 4: mod_base = OTHER; note = 2'-O-methyladenosine-3'-phosphate
  modified_base 6: mod_base = OTHER; note = 2'-O-methylguanosine-3'-phosphate
  modified_base 8: mod_base = OTHER; note = 2'-O-methylguanosine-3'-phosphate
  modified_base 9: mod_base = OTHER; note = 2'-O-methyladenosine-3'-phosphate
  modified_base 10: mod_base = OTHER; note = 2'-O-methylguanosine-3'-phosphate
  modified_base 11: mod_base = OTHER; note = 2'-O-methylguanosine-3'-phosphate
  modified_base 13: mod_base = OTHER; note = 2'-O-methyluridine-3'-phosphate
  modified_base 14: mod_base = OTHER; note = 2'-deoxy-2'-fluoroadenosine-3'-phosphate
  modified_base 15: mod_base = OTHER; note = 2'-O-methylguanosine-3'-phosphate
  modified_base 16: mod_base = OTHER; note = 2'-O-methyladenosine-3'-phosphate
  modified_base 17: mod_base = OTHER; note = 2'-O-methyladenosine-3'-phosphate
  modified_base 18: mod_base = OTHER; note = 2'-O-methyladenosine-3'-phosphate
  modified_base 19: mod_base = OTHER; note = 2'-O-methylguanosine-3'-phosphate
  modified_base 20: mod_base = OTHER; note = 2'-O-methyladenosine-3'-phosphate
  modified_base 21: mod_base = OTHER; note = 2'-O-methyladenosine-3'-phosphorothioate
  modified_base 22: mod_base = OTHER; note = 2'-O-methyluridine-3'-phosphorothioate
  modified_base 23: mod_base = OTHER; note = 2'-O-methyluridine
  misc_feature 1: note = RNA
  misc_feature 3..4: note = RNA
  misc_feature 6: note = RNA
  misc_feature 8..11: note = RNA
  misc_feature 13..23: note = RNA
  misc_feature 2: note = DNA
  misc_feature 5: note = DNA
  misc_feature 7: note = DNA
  misc_feature 12: note = DNA
tgcaagtgaggttagaaagaatt

SEQ ID NO: 1130 - DNA, 23 bp, synthetic construct
  source 1..23: mol_type = other DNA
  modified_base 1: mod_base = OTHER; note = 2'-O-methyluridine-3'-phosphate 5'-(E)-Vinylphosphonate
  modified_base 2: mod_base = OTHER; note = 2'-deoxy-2'-fluorouridine-3'-phosphate
  modified_base 3: mod_base = OTHER; note = 2'-O-methyluridine-3'-phosphate
  modified_base 4: mod_base = OTHER; note = 2'-O-methylguanosine-3'-phosphate
  modified_base 6: mod_base = OTHER; note = 2'-O-methyladenosine-3'-phosphate
  modified_base 7: mod_base = OTHER; note = Adenosine-glycol nucleic acid (GNA), S-isomer
  modified_base 8: mod_base = OTHER; note = 2'-O-methylguanosine-3'-phosphate
  modified_base 9: mod_base = OTHER; note = 2'-O-methyluridine-3'-phosphate
  modified_base 10: mod_base = OTHER; note = 2'-O-methylguanosine-3'-phosphate
  modified_base 11: mod_base = OTHER; note = 2'-O-methyladenosine-3'-phosphate
  modified_base 12: mod_base = OTHER; note = 2'-O-methylguanosine-3'-phosphate
  modified_base 13: mod_base = OTHER; note = 2'-O-methylguanosine-3'-phosphate
  modified_base 14: mod_base = OTHER; note = 2'-deoxy-2'-fluorouridine-3'-phosphate
  modified_base 15: mod_base = OTHER; note = 2'-O-methyluridine-3'-phosphate
  modified_base 16: mod_base = OTHER; note = 2'-deoxy-2'-fluoroadenosine-3'-phosphate
  modified_base 17: mod_base = OTHER; note = 2'-O-methylguanosine-3'-phosphate
  modified_base 18: mod_base = OTHER; note = 2'-O-methyladenosine-3'-phosphate
  modified_base 19: mod_base = OTHER; note = 2'-O-methyladenosine-3'-phosphate
  modified_base 20: mod_base = OTHER; note = 2'-O-methyladenosine-3'-phosphate
  modified_base 21: mod_base = OTHER; note = 2'-O-methylguanosine-3'-phosphorothioate
  modified_base 22: mod_base = OTHER; note = 2'-O-methyladenosine-3'-phosphorothioate
  modified_base 23: mod_base = OTHER; note = 2'-O-methyladenosine
  misc_feature 1..4: note = RNA
  misc_feature 6..23: note = RNA
  misc_feature 5: note = DNA
tttgcaagtgaggttagaaagaa

SEQ ID NO: 1131 - DNA, 23 bp, synthetic construct
  source 1..23: mol_type = other DNA
  modified_base 1: mod_base = OTHER; note = 2'-O-methyluridine-3'-phosphate 5'-(E)-Vinylphosphonate
  modified_base 2: mod_base = OTHER; note = 2'-deoxy-2'-fluoroadenosine-3'-phosphate
  modified_base 3: mod_base = OTHER; note = 2'-O-methyluridine-3'-phosphate
  modified_base 4: mod_base = OTHER; note = 2'-O-methyluridine-3'-phosphate
  modified_base 6: mod_base = OTHER; note = 2'-O-methylcytidine-3'-phosphate
  modified_base 7: mod_base = OTHER; note = Adenosine-glycol nucleic acid (GNA), S-isomer
  modified_base 8: mod_base = OTHER; note = 2'-O-methyladenosine-3'-phosphate
  modified_base 9: mod_base = OTHER; note = 2'-O-methylguanosine-3'-phosphate
  modified_base 10: mod_base = OTHER; note = 2'-O-methyluridine-3'-phosphate
  modified_base 11: mod_base = OTHER; note = 2'-O-methylguanosine-3'-phosphate
  modified_base 12: mod_base = OTHER; note = 2'-O-methyladenosine-3'-phosphate
  modified_base 13: mod_base = OTHER; note = 2'-O-methylguanosine-3'-phosphate
  modified_base 14: mod_base = OTHER; note = 2'-deoxy-2'-fluoroguanosine-3'-phosphate
  modified_base 15: mod_base = OTHER; note = 2'-O-methyluridine-3'-phosphate
  modified_base 16: mod_base = OTHER; note = 2'-deoxy-2'-fluorouridine-3'-phosphate
  modified_base 17: mod_base = OTHER; note = 2'-O-methyladenosine-3'-phosphate
  modified_base 18: mod_base = OTHER; note = 2'-O-methylguanosine-3'-phosphate
  modified_base 19: mod_base = OTHER; note = 2'-O-methyladenosine-3'-phosphate
  modified_base 20: mod_base = OTHER; note = 2'-O-methyladenosine-3'-phosphate
  modified_base 21: mod_base = OTHER; note = 2'-O-methyladenosine-3'-phosphorothioate
  modified_base 22: mod_base = OTHER; note = 2'-O-methylguanosine-3'-phosphorothioate
  modified_base 23: mod_base = OTHER; note = 2'-O-methyladenosine
  misc_feature 1..4: note = RNA
  misc_feature 6..23: note = RNA
  misc_feature 5: note = DNA
tattgcaagtgaggttagaaaga

SEQ ID NO: 1132 - DNA, 23 bp, synthetic construct
  source 1..23: mol_type = other DNA
  modified_base 1: mod_base = OTHER; note = 2'-O-methyluridine-3'-phosphate 5'-(E)-Vinylphosphonate
  modified_base 3: mod_base = OTHER; note = 2'-O-methyluridine-3'-phosphate
  modified_base 4: mod_base = OTHER; note = 2'-O-methyluridine-3'-phosphate
  modified_base 6: mod_base = OTHER; note = 2'-O-methyluridine-3'-phosphate
  modified_base 8: mod_base = OTHER; note = 2'-O-methylguanosine-3'-phosphate
  modified_base 9: mod_base = OTHER; note = 2'-O-methylcytidine-3'-phosphate
  modified_base 10: mod_base = OTHER; note = 2'-O-methyladenosine-3'-phosphate
  modified_base 11: mod_base = OTHER; note = 2'-O-methyladenosine-3'-phosphate
  modified_base 13: mod_base = OTHER; note = 2'-O-methyluridine-3'-phosphate
  modified_base 14: mod_base = OTHER; note = 2'-deoxy-2'-fluoroguanosine-3'-phosphate
  modified_base 15: mod_base = OTHER; note = 2'-O-methyladenosine-3'-phosphate
  modified_base 16: mod_base = OTHER; note = 2'-O-methylguanosine-3'-phosphate
  modified_base 17: mod_base = OTHER; note = 2'-O-methylguanosine-3'-phosphate
  modified_base 18: mod_base = OTHER; note = 2'-O-methyluridine-3'-phosphate
  modified_base 19: mod_base = OTHER; note = 2'-O-methyluridine-3'-phosphate
  modified_base 20: mod_base = OTHER; note = 2'-O-methyladenosine-3'-phosphate
  modified_base 21: mod_base = OTHER; note = 2'-O-methylguanosine-3'-phosphorothioate
  modified_base 22: mod_base = OTHER; note = 2'-O-methyladenosine-3'-phosphorothioate
  modified_base 23: mod_base = OTHER; note = 2'-O-methyladenosine
  misc_feature 1: note = RNA
  misc_feature 3..4: note = RNA
  misc_feature 6: note = RNA
  misc_feature 8..11: note = RNA
  misc_feature 13..23: note = RNA
  misc_feature 2: note = DNA
  misc_feature 5: note = DNA
  misc_feature 7: note = DNA
  misc_feature 12: note = DNA
tattattgcaagtgaggttagaa

SEQ ID NO: 1133 - DNA, 23 bp, synthetic construct
  source 1..23: mol_type = other DNA
  modified_base 1: mod_base = OTHER; note = 2'-O-methyluridine-3'-phosphate 5'-(E)-Vinylphosphonate
  modified_base 3: mod_base = OTHER; note = 2'-O-methyladenosine-3'-phosphate
  modified_base 4: mod_base = OTHER; note = 2'-O-methyluridine-3'-phosphate
  modified_base 6: mod_base = OTHER; note = 2'-O-methyladenosine-3'-phosphate
  modified_base 8: mod_base = OTHER; note = 2'-O-methyluridine-3'-phosphate
  modified_base 9: mod_base = OTHER; note = 2'-O-methylguanosine-3'-phosphate
  modified_base 10: mod_base = OTHER; note = 2'-O-methylcytidine-3'-phosphate
  modified_base 11: mod_base = OTHER; note = 2'-O-methyladenosine-3'-phosphate
  modified_base 13: mod_base = OTHER; note = 2'-O-methylguanosine-3'-phosphate
  modified_base 14: mod_base = OTHER; note = 2'-deoxy-2'-fluorouridine-3'-phosphate
  modified_base 15: mod_base = OTHER; note = 2'-O-methylguanosine-3'-phosphate
  modified_base 16: mod_base = OTHER; note = 2'-O-methyladenosine-3'-phosphate
  modified_base 17: mod_base = OTHER; note = 2'-O-methylguanosine-3'-phosphate
  modified_base 18: mod_base = OTHER; note = 2'-O-methylguanosine-3'-phosphate
  modified_base 19: mod_base = OTHER; note = 2'-O-methyluridine-3'-phosphate
  modified_base 20: mod_base = OTHER; note = 2'-O-methyluridine-3'-phosphate
  modified_base 21: mod_base = OTHER; note = 2'-O-methyladenosine-3'-phosphorothioate
  modified_base 22: mod_base = OTHER; note = 2'-O-methylguanosine-3'-phosphorothioate
  modified_base 23: mod_base = OTHER; note = 2'-O-methyladenosine
  misc_feature 1: note = RNA
  misc_feature 3..4: note = RNA
  misc_feature 6: note = RNA
  misc_feature 8..11: note = RNA
  misc_feature 13..23: note = RNA
  misc_feature 2: note = DNA
  misc_feature 5: note = DNA
  misc_feature 7: note = DNA
  misc_feature 12: note = DNA
taattattgcaagtgaggttaga

SEQ ID NO: 1134 - DNA, 23 bp, synthetic construct
  source 1..23: mol_type = other DNA
  modified_base 1: mod_base = OTHER; note = 2'-O-methyluridine-3'-phosphate 5'-(E)-Vinylphosphonate
  modified_base 3: mod_base = OTHER; note = 2'-O-methyladenosine-3'-phosphate
  modified_base 4: mod_base = OTHER; note = 2'-O-methyladenosine-3'-phosphate
  modified_base 6: mod_base = OTHER; note = 2'-O-methyluridine-3'-phosphate
  modified_base 8: mod_base = OTHER; note = 2'-O-methyluridine-3'-phosphate
  modified_base 9: mod_base = OTHER; note = 2'-O-methyluridine-3'-phosphate
  modified_base 10: mod_base = OTHER; note = 2'-O-methylguanosine-3'-phosphate
  modified_base 11: mod_base = OTHER; note = 2'-O-methylcytidine-3'-phosphate
  modified_base 13: mod_base = OTHER; note = 2'-O-methyladenosine-3'-phosphate
  modified_base 14: mod_base = OTHER; note = 2'-deoxy-2'-fluoroguanosine-3'-phosphate
  modified_base 15: mod_base = OTHER; note = 2'-O-methyluridine-3'-phosphate
  modified_base 16: mod_base = OTHER; note = 2'-O-methylguanosine-3'-phosphate
  modified_base 17: mod_base = OTHER; note = 2'-O-methyladenosine-3'-phosphate
  modified_base 18: mod_base = OTHER; note = 2'-O-methylguanosine-3'-phosphate
  modified_base 19: mod_base = OTHER; note = 2'-O-methylguanosine-3'-phosphate
  modified_base 20: mod_base = OTHER; note = 2'-O-methyluridine-3'-phosphate
  modified_base 21: mod_base = OTHER; note = 2'-O-methyluridine-3'-phosphorothioate
  modified_base 22: mod_base = OTHER; note = 2'-O-methyladenosine-3'-phosphorothioate
  modified_base 23: mod_base = OTHER; note = 2'-O-methylguanosine
  misc_feature 1: note = RNA
  misc_feature 3..4: note = RNA
  misc_feature 6: note = RNA
  misc_feature 8..11: note = RNA
  misc_feature 13..23: note = RNA
  misc_feature 2: note = DNA
  misc_feature 5: note = DNA
  misc_feature 7: note = DNA
  misc_feature 12: note = DNA
ttaattattgcaagtgaggttag

SEQ ID NO: 1135 - DNA, 23 bp, synthetic construct
  source 1..23: mol_type = other DNA
  modified_base 1: mod_base = OTHER; note = 2'-O-methyluridine-3'-phosphate 5'-(E)-Vinylphosphonate
  modified_base 3: mod_base = OTHER; note = 2'-O-methyluridine-3'-phosphate
  modified_base 4: mod_base = OTHER; note = 2'-O-methyladenosine-3'-phosphate
  modified_base 6: mod_base = OTHER; note = 2'-O-methyluridine-3'-phosphate
  modified_base 8: mod_base = OTHER; note = 2'-O-methyladenosine-3'-phosphate
  modified_base 9: mod_base = OTHER; note = 2'-O-methyluridine-3'-phosphate
  modified_base 10: mod_base = OTHER; note = 2'-O-methyluridine-3'-phosphate
  modified_base 11: mod_base = OTHER; note = 2'-O-methylguanosine-3'-phosphate
  modified_base 13: mod_base = OTHER; note = 2'-O-methyladenosine-3'-phosphate
  modified_base 14: mod_base = OTHER; note = 2'-deoxy-2'-fluoroadenosine-3'-phosphate
  modified_base 15: mod_base = OTHER; note = 2'-O-methylguanosine-3'-phosphate
  modified_base 16: mod_base = OTHER; note = 2'-O-methyluridine-3'-phosphate
  modified_base 17: mod_base = OTHER; note = 2'-O-methylguanosine-3'-phosphate
  modified_base 18: mod_base = OTHER; note = 2'-O-methyladenosine-3'-phosphate
  modified_base 19: mod_base = OTHER; note = 2'-O-methylguanosine-3'-phosphate
  modified_base 20: mod_base = OTHER; note = 2'-O-methylguanosine-3'-phosphate
  modified_base 21: mod_base = OTHER; note = 2'-O-methyluridine-3'-phosphorothioate
  modified_base 22: mod_base = OTHER; note = 2'-O-methyluridine-3'-phosphorothioate
  modified_base 23: mod_base = OTHER; note = 2'-O-methyladenosine
  misc_feature 1: note = RNA
  misc_feature 3..4: note = RNA
  misc_feature 6: note = RNA
  misc_feature 8..11: note = RNA
  misc_feature 13..23: note = RNA
  misc_feature 2: note = DNA
  misc_feature 5: note = DNA
  misc_feature 7: note = DNA
  misc_feature 12: note = DNA
tataattattgcaagtgaggtta

SEQ ID NO: 1136 - DNA, 23 bp, synthetic construct
  source 1..23: mol_type = other DNA
  modified_base 1: mod_base = OTHER; note = 2'-O-methyluridine-3'-phosphate 5'-(E)-Vinylphosphonate
  modified_base 3: mod_base = OTHER; note = 2'-O-methyladenosine-3'-phosphate
  modified_base 4: mod_base = OTHER; note = 2'-O-methyluridine-3'-phosphate
  modified_base 6: mod_base = OTHER; note = 2'-O-methyladenosine-3'-phosphate
  modified_base 8: mod_base = OTHER; note = 2'-O-methyluridine-3'-phosphate
  modified_base 9: mod_base = OTHER; note = 2'-O-methyladenosine-3'-phosphate
  modified_base 10: mod_base = OTHER; note = 2'-O-methyluridine-3'-phosphate
  modified_base 11: mod_base = OTHER; note = 2'-O-methyluridine-3'-phosphate
  modified_base 13: mod_base = OTHER; note = 2'-O-methylcytidine-3'-phosphate
  modified_base 14: mod_base = OTHER; note = 2'-deoxy-2'-fluoroadenosine-3'-phosphate
  modified_base 15: mod_base = OTHER; note = 2'-O-methyladenosine-3'-phosphate
  modified_base 16: mod_base = OTHER; note = 2'-O-methylguanosine-3'-phosphate
  modified_base 17: mod_base = OTHER; note = 2'-O-methyluridine-3'-phosphate
  modified_base 18: mod_base = OTHER; note = 2'-O-methylguanosine-3'-phosphate
  modified_base 19: mod_base = OTHER; note = 2'-O-methyladenosine-3'-phosphate
  modified_base 20: mod_base = OTHER; note = 2'-O-methylguanosine-3'-phosphate
  modified_base 21: mod_base = OTHER; note = 2'-O-methylguanosine-3'-phosphorothioate
  modified_base 22: mod_base = OTHER; note = 2'-O-methyluridine-3'-phosphorothioate
  modified_base 23: mod_base = OTHER; note = 2'-O-methyluridine
  misc_feature 1: note = RNA
  misc_feature 3..4: note = RNA
  misc_feature 6: note = RNA
  misc_feature 8..11: note = RNA
  misc_feature 13..23: note = RNA
  misc_feature 2: note = DNA
  misc_feature 5: note = DNA
  misc_feature 7: note = DNA
  misc_feature 12: note = DNA
ttataattattgcaagtgaggtt

SEQ ID NO: 1137 - DNA, 23 bp, synthetic construct
  source 1..23: mol_type = other DNA
  modified_base 1: mod_base = OTHER; note = 2'-O-methyluridine-3'-phosphate 5'-(E)-Vinylphosphonate
  modified_base 2: mod_base = OTHER; note = 2'-deoxy-2'-fluorouridine-3'-phosphate
  modified_base 3: mod_base = OTHER; note = 2'-O-methyluridine-3'-phosphate
  modified_base 4: mod_base = OTHER; note = 2'-O-methyladenosine-3'-phosphate
  modified_base 6: mod_base = OTHER; note = 2'-O-methyladenosine-3'-phosphate
  modified_base 7: mod_base = OTHER; note = Adenosine-glycol nucleic acid (GNA), S-isomer
  modified_base 8: mod_base = OTHER; note = 2'-O-methyluridine-3'-phosphate
  modified_base 9: mod_base = OTHER; note = 2'-O-methyluridine-3'-phosphate
  modified_base 10: mod_base = OTHER; note = 2'-O-methyladenosine-3'-phosphate
  modified_base 11: mod_base = OTHER; note = 2'-O-methyluridine-3'-phosphate
  modified_base 12: mod_base = OTHER; note = 2'-O-methyluridine-3'-phosphate
  modified_base 13: mod_base = OTHER; note = 2'-O-methylguanosine-3'-phosphate
  modified_base 14: mod_base = OTHER; note = 2'-deoxy-2'-fluorocytidine-3'-phosphate
  modified_base 15: mod_base = OTHER; note = 2'-O-methyladenosine-3'-phosphate
  modified_base 16: mod_base = OTHER; note = 2'-deoxy-2'-fluoroadenosine-3'-phosphate
  modified_base 17: mod_base = OTHER; note = 2'-O-methylguanosine-3'-phosphate
  modified_base 18: mod_base = OTHER; note = 2'-O-methyluridine-3'-phosphate
  modified_base 19: mod_base = OTHER; note = 2'-O-methylguanosine-3'-phosphate
  modified_base 20: mod_base = OTHER; note = 2'-O-methyladenosine-3'-phosphate
  modified_base 21: mod_base = OTHER; note = 2'-O-methylguanosine-3'-phosphorothioate
  modified_base 22: mod_base = OTHER; note = 2'-O-methylguanosine-3'-phosphorothioate
  modified_base 23: mod_base = OTHER; note = 2'-O-methyluridine
  misc_feature 1..4: note = RNA
  misc_feature 6..23: note = RNA
  misc_feature 5: note = DNA
tttataattattgcaagtgaggt

SEQ ID NO: 1138 - DNA, 23 bp, synthetic construct
  source 1..23: mol_type = other DNA
  modified_base 1: mod_base = OTHER; note = 2'-O-methyluridine-3'-phosphate 5'-(E)-Vinylphosphonate
  modified_base 3: mod_base = OTHER; note = 2'-O-methyluridine-3'-phosphate
  modified_base 4: mod_base = OTHER; note = 2'-O-methyladenosine-3'-phosphate
  modified_base 6: mod_base = OTHER; note = 2'-O-methyladenosine-3'-phosphate
  modified_base 8: mod_base = OTHER; note = 2'-O-methyluridine-3'-phosphate
  modified_base 9: mod_base = OTHER; note = 2'-O-methyluridine-3'-phosphate
  modified_base 10: mod_base = OTHER; note = 2'-O-methyladenosine-3'-phosphate
  modified_base 11: mod_base = OTHER; note = 2'-O-methyluridine-3'-phosphate
  modified_base 13: mod_base = OTHER; note = 2'-O-methylguanosine-3'-phosphate
  modified_base 14: mod_base = OTHER; note = 2'-deoxy-2'-fluorocytidine-3'-phosphate
  modified_base 15: mod_base = OTHER; note = 2'-O-methyladenosine-3'-phosphate
  modified_base 16: mod_base = OTHER; note = 2'-O-methyladenosine-3'-phosphate
  modified_base 17: mod_base = OTHER; note = 2'-O-methylguanosine-3'-phosphate
  modified_base 18: mod_base = OTHER; note = 2'-O-methyluridine-3'-phosphate
  modified_base 19: mod_base = OTHER; note = 2'-O-methylguanosine-3'-phosphate
  modified_base 20: mod_base = OTHER; note = 2'-O-methyladenosine-3'-phosphate
  modified_base 21: mod_base = OTHER; note = 2'-O-methylguanosine-3'-phosphorothioate
  modified_base 22: mod_base = OTHER; note = 2'-O-methylguanosine-3'-phosphorothioate
  modified_base 23: mod_base = OTHER; note = 2'-O-methyluridine
  misc_feature 1: note = RNA
  misc_feature 3..4: note = RNA
  misc_feature 6: note = RNA
  misc_feature 8..11: note = RNA
  misc_feature 13..23: note = RNA
  misc_feature 2: note = DNA
  misc_feature 5: note = DNA
  misc_feature 7: note = DNA
  misc_feature 12: note = DNA
tttataattattgcaagtgaggt

SEQ ID NO: 1139 - DNA, 23 bp, synthetic construct
  source 1..23: mol_type = other DNA
  modified_base 1: mod_base = OTHER; note = 2'-O-methyluridine-3'-phosphate 5'-(E)-Vinylphosphonate
  modified_base 3: mod_base = OTHER; note = 2'-O-methyluridine-3'-phosphate
  modified_base 4: mod_base = OTHER; note = 2'-O-methyluridine-3'-phosphate
  modified_base 6: mod_base = OTHER; note = 2'-O-methyluridine-3'-phosphate
  modified_base 8: mod_base = OTHER; note = 2'-O-methyladenosine-3'-phosphate
  modified_base 9: mod_base = OTHER; note = 2'-O-methyluridine-3'-phosphate
  modified_base 10: mod_base = OTHER; note = 2'-O-methyluridine-3'-phosphate
  modified_base 11: mod_base = OTHER; note = 2'-O-methyladenosine-3'-phosphate
  modified_base 13: mod_base = OTHER; note = 2'-O-methyluridine-3'-phosphate
  modified_base 14: mod_base = OTHER; note = 2'-deoxy-2'-fluoroguanosine-3'-phosphate
  modified_base 15: mod_base = OTHER; note = 2'-O-methylcytidine-3'-phosphate
  modified_base 16: mod_base = OTHER; note = 2'-O-methyladenosine-3'-phosphate
  modified_base 17: mod_base = OTHER; note = 2'-O-methyladenosine-3'-phosphate
  modified_base 18: mod_base = OTHER; note = 2'-O-methylguanosine-3'-phosphate
  modified_base 19: mod_base = OTHER; note = 2'-O-methyluridine-3'-phosphate
  modified_base 20: mod_base = OTHER; note = 2'-O-methylguanosine-3'-phosphate
  modified_base 21: mod_base = OTHER; note = 2'-O-methyladenosine-3'-phosphorothioate
  modified_base 22: mod_base = OTHER; note = 2'-O-methylguanosine-3'-phosphorothioate
  modified_base 23: mod_base = OTHER; note = 2'-O-methylguanosine
  misc_feature 1: note = RNA
  misc_feature 3..4: note = RNA
  misc_feature 6: note = RNA
  misc_feature 8..11: note = RNA
  misc_feature 13..23: note = RNA
  misc_feature 2: note = DNA
  misc_feature 5: note = DNA
  misc_feature 7: note = DNA
  misc_feature 12: note = DNA
tcttataattattgcaagtgagg

SEQ ID NO: 1140 - DNA, 23 bp, synthetic construct
  source 1..23: mol_type = other DNA
  modified_base 1: mod_base = OTHER; note = 2'-O-methyluridine-3'-phosphate 5'-(E)-Vinylphosphonate
  modified_base 3: mod_base = OTHER; note = 2'-O-methylcytidine-3'-phosphate
  modified_base 4: mod_base = OTHER; note = 2'-O-methyluridine-3'-phosphate
  modified_base 6: mod_base = OTHER; note = 2'-O-methyladenosine-3'-phosphate
  modified_base 8: mod_base = OTHER; note = 2'-O-methyladenosine-3'-phosphate
  modified_base 9: mod_base = OTHER; note = 2'-O-methyladenosine-3'-phosphate
  modified_base 10: mod_base = OTHER; note = 2'-O-methyluridine-3'-phosphate
  modified_base 11: mod_base = OTHER; note = 2'-O-methyluridine-3'-phosphate
  modified_base 13: mod_base = OTHER; note = 2'-O-methyluridine-3'-phosphate
  modified_base 14: mod_base = OTHER; note = 2'-deoxy-2'-fluorouridine-3'-phosphate
  modified_base 15: mod_base = OTHER; note = 2'-O-methylguanosine-3'-phosphate
  modified_base 16: mod_base = OTHER; note = 2'-O-methylcytidine-3'-phosphate
  modified_base 17: mod_base = OTHER; note = 2'-O-methyladenosine-3'-phosphate
  modified_base 18: mod_base = OTHER; note = 2'-O-methyladenosine-3'-phosphate
  modified_base 19: mod_base = OTHER; note = 2'-O-methylguanosine-3'-phosphate
  modified_base 20: mod_base = OTHER; note = 2'-O-methyluridine-3'-phosphate
  modified_base 21: mod_base = OTHER; note = 2'-O-methylguanosine-3'-phosphorothioate
  modified_base 22: mod_base = OTHER; note = 2'-O-methyladenosine-3'-phosphorothioate
  modified_base 23: mod_base = OTHER; note = 2'-O-methylguanosine
  misc_feature 1: note = RNA
  misc_feature 3..4: note = RNA
  misc_feature 6: note = RNA
  misc_feature 8..11: note = RNA
  misc_feature 13..23: note = RNA
  misc_feature 2: note = DNA
  misc_feature 5: note = DNA
  misc_feature 7: note = DNA
  misc_feature 12: note = DNA
ttcttataattattgcaagtgag

SEQ ID NO: 1141 - DNA, 23 bp, synthetic construct
  source 1..23: mol_type = other DNA
  modified_base 1: mod_base = OTHER; note = 2'-O-methyluridine-3'-phosphate 5'-(E)-Vinylphosphonate
  modified_base 2: mod_base = OTHER; note = 2'-deoxy-2'-fluoroguanosine-3'-phosphate
  modified_base 3: mod_base = OTHER; note = 2'-O-methylcytidine-3'-phosphate
  modified_base 4: mod_base = OTHER; note = 2'-O-methylcytidine-3'-phosphate
  modified_base 6: mod_base = OTHER; note = 2'-O-methylcytidine-3'-phosphate
  modified_base 7: mod_base = OTHER; note = Thymidine-glycol nucleic acid (GNA), S-Isomer
  modified_base 8: mod_base = OTHER; note = 2'-O-methyladenosine-3'-phosphate
  modified_base 9: mod_base = OTHER; note = 2'-O-methyluridine-3'-phosphate
  modified_base 10: mod_base = OTHER; note = 2'-O-methyladenosine-3'-phosphate
  modified_base 11: mod_base = OTHER; note = 2'-O-methylcytidine-3'-phosphate
  modified_base 12: mod_base = OTHER; note = 2'-O-methylcytidine-3'-phosphate
  modified_base 13: mod_base = OTHER; note = 2'-O-methyladenosine-3'-phosphate
  modified_base 14: mod_base = OTHER; note = 2'-deoxy-2'-fluorocytidine-3'-phosphate
  modified_base 15: mod_base = OTHER; note = 2'-O-methylcytidine-3'-phosphate
  modified_base 16: mod_base = OTHER; note = 2'-deoxy-2'-fluorocytidine-3'-phosphate
  modified_base 17: mod_base = OTHER; note = 2'-O-methyladenosine-3'-phosphate
  modified_base 18: mod_base = OTHER; note = 2'-O-methylcytidine-3'-phosphate
  modified_base 19: mod_base = OTHER; note = 2'-O-methyluridine-3'-phosphate
  modified_base 20: mod_base = OTHER; note = 2'-O-methyluridine-3'-phosphate
  modified_base 21: mod_base = OTHER; note = 2'-O-methylguanosine-3'-phosphorothioate
  modified_base 22: mod_base = OTHER; note = 2'-O-methylguanosine-3'-phosphorothioate
  modified_base 23: mod_base = OTHER; note = 2'-O-methylcytidine
  misc_feature 1..4: note = RNA
  misc_feature 6..23: note = RNA
  misc_feature 5: note = DNA
tgcctctataccacccacttggc

SEQ ID NO: 1142 - DNA, 23 bp, synthetic construct
  source 1..23: mol_type = other DNA
  modified_base 1: mod_base = OTHER; note = 2'-O-methyluridine-3'-phosphate 5'-(E)-Vinylphosphonate
  modified_base 2: mod_base = OTHER; note = 2'-deoxy-2'-fluoroadenosine-3'-phosphate
  modified_base 3: mod_base = OTHER; note = 2'-O-methylguanosine-3'-phosphate
  modified_base 4: mod_base = OTHER; note = 2'-O-methylguanosine-3'-phosphate
  modified_base 6: mod_base = OTHER; note = 2'-O-methylcytidine-3'-phosphate
  modified_base 7: mod_base = OTHER; note = Adenosine-glycol nucleic acid (GNA), S-isomer
  modified_base 8: mod_base = OTHER; note = 2'-O-methylguanosine-3'-phosphate
  modified_base 9: mod_base = OTHER; note = 2'-O-methyluridine-3'-phosphate
  modified_base 10: mod_base = OTHER; note = 2'-O-methyladenosine-3'-phosphate
  modified_base 11: mod_base = OTHER; note = 2'-O-methylcytidine-3'-phosphate
  modified_base 12: mod_base = OTHER; note = 2'-O-methylguanosine-3'-phosphate
  modified_base 13: mod_base = OTHER; note = 2'-O-methylcytidine-3'-phosphate
  modified_base 14: mod_base = OTHER; note = 2'-deoxy-2'-fluoroadenosine-3'-phosphate
  modified_base 15: mod_base = OTHER; note = 2'-O-methylcytidine-3'-phosphate
  modified_base 16: mod_base = OTHER; note = 2'-deoxy-2'-fluoroadenosine-3'-phosphate
  modified_base 17: mod_base = OTHER; note = 2'-O-methyladenosine-3'-phosphate
  modified_base 18: mod_base = OTHER; note = 2'-O-methylguanosine-3'-phosphate
  modified_base 19: mod_base = OTHER; note = 2'-O-methyladenosine-3'-phosphate
  modified_base 20: mod_base = OTHER; note = 2'-O-methylguanosine-3'-phosphate
  modified_base 21: mod_base = OTHER; note = 2'-O-methylcytidine-3'-phosphorothioate
  modified_base 22: mod_base = OTHER; note = 2'-O-methylcytidine-3'-phosphorothioate
  modified_base 23: mod_base = OTHER; note = 2'-O-methyluridine
  misc_feature 1..4: note = RNA
  misc_feature 6..23: note = RNA
  misc_feature 5: note = DNA
taggacagtacgcacaagagcct

SEQ ID NO: 1143 - DNA, 23 bp, synthetic construct
  source 1..23: mol_type = other DNA
  modified_base 1: mod_base = OTHER; note = 2'-O-methyluridine-3'-phosphate 5'-(E)-Vinylphosphonate
  modified_base 3: mod_base = OTHER; note = 2'-O-methylguanosine-3'-phosphate
  modified_base 4: mod_base = OTHER; note = 2'-O-methyladenosine-3'-phosphate
  modified_base 6: mod_base = OTHER; note = 2'-O-methylguanosine-3'-phosphate
  modified_base 8: mod_base = OTHER; note = 2'-O-methylguanosine-3'-phosphate
  modified_base 9: mod_base = OTHER; note = 2'-O-methylcytidine-3'-phosphate
  modified_base 10: mod_base = OTHER; note = 2'-O-methyladenosine-3'-phosphate
  modified_base 11: mod_base = OTHER; note = 2'-O-methylcytidine-3'-phosphate
  modified_base 13: mod_base = OTHER; note = 2'-O-methylguanosine-3'-phosphate
  modified_base 14: mod_base = OTHER; note = 2'-deoxy-2'-fluoroadenosine-3'-phosphate
  modified_base 15: mod_base = OTHER; note = 2'-O-methyluridine-3'-phosphate
  modified_base 16: mod_base = OTHER; note = 2'-O-methylguanosine-3'-phosphate
  modified_base 17: mod_base = OTHER; note = 2'-O-methylguanosine-3'-phosphate
  modified_base 18: mod_base = OTHER; note = 2'-O-methylcytidine-3'-phosphate
  modified_base 19: mod_base = OTHER; note = 2'-O-methyladenosine-3'-phosphate
  modified_base 20: mod_base = OTHER; note = 2'-O-methylguanosine-3'-phosphate
  modified_base 21: mod_base = OTHER; note = 2'-O-methylguanosine-3'-phosphorothioate
  modified_base 22: mod_base = OTHER; note = 2'-O-methylcytidine-3'-phosphorothioate
  modified_base 23: mod_base = OTHER; note = 2'-O-methyluridine
  misc_feature 1: note = RNA
  misc_feature 3..4: note = RNA
  misc_feature 6: note = RNA
  misc_feature 8..11: note = RNA
  misc_feature 13..23: note = RNA
  misc_feature 2: note = DNA
  misc_feature 5: note = DNA
  misc_feature 7: note = DNA
  misc_feature 12: note = DNA
tcgaagagcacagatggcaggct

SEQ ID NO: 1144 - DNA, 23 bp, synthetic construct
  source 1..23: mol_type = other DNA
  modified_base 1: mod_base = OTHER; note = 2'-O-methyluridine-3'-phosphate 5'-(E)-Vinylphosphonate
  modified_base 3: mod_base = OTHER; note = 2'-O-methylcytidine-3'-phosphate
  modified_base 4: mod_base = OTHER; note = 2'-O-methylguanosine-3'-phosphate
  modified_base 6: mod_base = OTHER; note = 2'-O-methyladenosine-3'-phosphate
  modified_base 8: mod_base = OTHER; note = 2'-O-methyladenosine-3'-phosphate
  modified_base 9: mod_base = OTHER; note = 2'-O-methylguanosine-3'-phosphate
  modified_base 10: mod_base = OTHER; note = 2'-O-methylcytidine-3'-phosphate
  modified_base 11: mod_base = OTHER; note = 2'-O-methyladenosine-3'-phosphate
  modified_base 13: mod_base = OTHER; note = 2'-O-methyladenosine-3'-phosphate
  modified_base 14: mod_base = OTHER; note = 2'-deoxy-2'-fluoroguanosine-3'-phosphate
  modified_base 15: mod_base = OTHER; note = 2'-O-methyladenosine-3'-phosphate
  modified_base 16: mod_base = OTHER; note = 2'-O-methyluridine-3'-phosphate
  modified_base 17: mod_base = OTHER; note = 2'-O-methylguanosine-3'-phosphate
  modified_base 18: mod_base = OTHER; note = 2'-O-methylguanosine-3'-phosphate
  modified_base 19: mod_base = OTHER; note = 2'-O-methylcytidine-3'-phosphate
  modified_base 20: mod_base = OTHER; note = 2'-O-methyladenosine-3'-phosphate
  modified_base 21: mod_base = OTHER; note = 2'-O-methylguanosine-3'-phosphorothioate
  modified_base 22: mod_base = OTHER; note = 2'-O-methylguanosine-3'-phosphorothioate
  modified_base 23: mod_base = OTHER; note = 2'-O-methylcytidine
  misc_feature 1: note = RNA
  misc_feature 3..4: note = RNA
  misc_feature 6: note = RNA
  misc_feature 8..11: note = RNA
  misc_feature 13..23: note = RNA
  misc_feature 2: note = DNA
  misc_feature 5: note = DNA
  misc_feature 7: note = DNA
  misc_feature 12: note = DNA
tacgaagagcacagatggcaggc

SEQ ID NO: 1145 - DNA, 23 bp, synthetic construct
  source 1..23: mol_type = other DNA
  modified_base 1: mod_base = OTHER; note = 2'-O-methyluridine-3'-phosphate 5'-(E)-Vinylphosphonate
  modified_base 3: mod_base = OTHER; note = 2'-O-methyladenosine-3'-phosphate
  modified_base 4: mod_base = OTHER; note = 2'-O-methylcytidine-3'-phosphate
  modified_base 6: mod_base = OTHER; note = 2'-O-methyladenosine-3'-phosphate
  modified_base 8: mod_base = OTHER; note = 2'-O-methylguanosine-3'-phosphate
  modified_base 9: mod_base = OTHER; note = 2'-O-methyladenosine-3'-phosphate
  modified_base 10: mod_base = OTHER; note = 2'-O-methylguanosine-3'-phosphate
  modified_base 11: mod_base = OTHER; note = 2'-O-methylcytidine-3'-phosphate
  modified_base 13: mod_base = OTHER; note = 2'-O-methylcytidine-3'-phosphate
  modified_base 14: mod_base = OTHER; note = 2'-deoxy-2'-fluoroadenosine-3'-phosphate
  modified_base 15: mod_base = OTHER; note = 2'-O-methylguanosine-3'-phosphate
  modified_base 16: mod_base = OTHER; note = 2'-O-methyladenosine-3'-phosphate
  modified_base 17: mod_base = OTHER; note = 2'-O-methyluridine-3'-phosphate
  modified_base 18: mod_base = OTHER; note = 2'-O-methylguanosine-3'-phosphate
  modified_base 19: mod_base = OTHER; note = 2'-O-methylguanosine-3'-phosphate
  modified_base 20: mod_base = OTHER; note = 2'-O-methylcytidine-3'-phosphate
  modified_base 21: mod_base = OTHER; note = 2'-O-methyladenosine-3'-phosphorothioate
  modified_base 22: mod_base = OTHER; note = 2'-O-methylguanosine-3'-phosphorothioate
  modified_base 23: mod_base = OTHER; note = 2'-O-methylguanosine
  misc_feature 1: note = RNA
  misc_feature 3..4: note = RNA
  misc_feature 6: note = RNA
  misc_feature 8..11: note = RNA
  misc_feature 13..23: note = RNA
  misc_feature 2: note = DNA
  misc_feature 5: note = DNA
  misc_feature 7: note = DNA
  misc_feature 12: note = DNA
tgacgaagagcacagatggcagg

SEQ ID NO: 1146 - DNA, 23 bp, synthetic construct
  source 1..23: mol_type = other DNA
  modified_base 1: mod_base = OTHER; note = 2'-O-methyluridine-3'-phosphate 5'-(E)-Vinylphosphonate
  modified_base 3: mod_base = OTHER; note = 2'-O-methylguanosine-3'-phosphate
  modified_base 4: mod_base = OTHER; note = 2'-O-methyladenosine-3'-phosphate
  modified_base 6: mod_base = OTHER; note = 2'-O-methylguanosine-3'-phosphate
  modified_base 8: mod_base = OTHER; note = 2'-O-methyladenosine-3'-phosphate
  modified_base 9: mod_base = OTHER; note = 2'-O-methylguanosine-3'-phosphate
  modified_base 10: mod_base = OTHER; note = 2'-O-methyladenosine-3'-phosphate
  modified_base 11: mod_base = OTHER; note = 2'-O-methylguanosine-3'-phosphate
  modified_base 13: mod_base = OTHER; note = 2'-O-methyladenosine-3'-phosphate
  modified_base 14: mod_base = OTHER; note = 2'-deoxy-2'-fluorocytidine-3'-phosphate
  modified_base 15: mod_base = OTHER; note = 2'-O-methyladenosine-3'-phosphate
  modified_base 16: mod_base = OTHER; note = 2'-O-methylguanosine-3'-phosphate
  modified_base 17: mod_base = OTHER; note = 2'-O-methyladenosine-3'-phosphate
  modified_base 18: mod_base = OTHER; note = 2'-O-methyluridine-3'-phosphate
  modified_base 19: mod_base = OTHER; note = 2'-O-methylguanosine-3'-phosphate
  modified_base 20: mod_base = OTHER; note = 2'-O-methylguanosine-3'-phosphate
  modified_base 21: mod_base = OTHER; note = 2'-O-methylcytidine-3'-phosphorothioate
  modified_base 22: mod_base = OTHER; note = 2'-O-methyladenosine-3'-phosphorothioate
  modified_base 23: mod_base = OTHER; note = 2'-O-methylguanosine
  misc_feature 1: note = RNA
  misc_feature 3..4: note = RNA
  misc_feature 6: note = RNA
  misc_feature 8..11: note = RNA
  misc_feature 13..23: note = RNA
  misc_feature 2: note = DNA
  misc_feature 5: note = DNA
  misc_feature 7: note = DNA
  misc_feature 12: note = DNA
ttgacgaagagcacagatggcag

SEQ ID NO: 1147 - DNA, 23 bp, synthetic construct
  source 1..23: mol_type = other DNA
  modified_base 1: mod_base = OTHER; note = 2'-O-methyluridine-3'-phosphate 5'-(E)-Vinylphosphonate
  modified_base 3: mod_base = OTHER; note = 2'-O-methyluridine-3'-phosphate
  modified_base 4: mod_base = OTHER; note = 2'-O-methylguanosine-3'-phosphate
  modified_base 6: mod_base = OTHER; note = 2'-O-methylcytidine-3'-phosphate
  modified_base 8: mod_base = OTHER; note = 2'-O-methyladenosine-3'-phosphate
  modified_base 9: mod_base = OTHER; note = 2'-O-methyladenosine-3'-phosphate
  modified_base 10: mod_base = OTHER; note = 2'-O-methylguanosine-3'-phosphate
  modified_base 11: mod_base = OTHER; note = 2'-O-methyladenosine-3'-phosphate
  modified_base 13: mod_base = OTHER; note = 2'-O-methylcytidine-3'-phosphate
  modified_base 14: mod_base = OTHER; note = 2'-deoxy-2'-fluoroadenosine-3'-phosphate
  modified_base 15: mod_base = OTHER; note = 2'-O-methylcytidine-3'-phosphate
  modified_base 16: mod_base = OTHER; note = 2'-O-methyladenosine-3'-phosphate
  modified_base 17: mod_base = OTHER; note = 2'-O-methylguanosine-3'-phosphate
  modified_base 18: mod_base = OTHER; note = 2'-O-methyladenosine-3'-phosphate
  modified_base 19: mod_base = OTHER; note = 2'-O-methyluridine-3'-phosphate
  modified_base 20: mod_base = OTHER; note = 2'-O-methylguanosine-3'-phosphate
  modified_base 21: mod_base = OTHER; note = 2'-O-methylguanosine-3'-phosphorothioate
  modified_base 22: mod_base = OTHER; note = 2'-O-methylcytidine-3'-phosphorothioate
  modified_base 23: mod_base = OTHER; note = 2'-O-methyladenosine
  misc_feature 1: note = RNA
  misc_feature 3..4: note = RNA
  misc_feature 6: note = RNA
  misc_feature 8..11: note = RNA
  misc_feature 13..23: note = RNA
  misc_feature 2: note = DNA
  misc_feature 5: note = DNA
  misc_feature 7: note = DNA
  misc_feature 12: note = DNA
tatgacgaagagcacagatggca

SEQ ID NO: 1148 - DNA, 23 bp, synthetic construct
  source 1..23: mol_type = other DNA
  modified_base 1: mod_base = OTHER; note = 2'-O-methyluridine-3'-phosphate 5'-(E)-Vinylphosphonate
  modified_base 2: mod_base = OTHER; note = 2'-deoxy-2'-fluoroadenosine-3'-phosphate
  modified_base 3: mod_base = OTHER; note = 2'-O-methylguanosine-3'-phosphate
  modified_base 4: mod_base = OTHER; note = 2'-O-methyladenosine-3'-phosphate
  modified_base 6: mod_base = OTHER; note = 2'-O-methylguanosine-3'-phosphate
  modified_base 7: mod_base = OTHER; note = Adenosine-glycol nucleic acid (GNA), S-isomer
  modified_base 8: mod_base = OTHER; note = 2'-O-methylcytidine-3'-phosphate
  modified_base 9: mod_base = OTHER; note = 2'-O-methylguanosine-3'-phosphate
  modified_base 10: mod_base = OTHER; note = 2'-O-methyladenosine-3'-phosphate
  modified_base 11: mod_base = OTHER; note = 2'-O-methyladenosine-3'-phosphate
  modified_base 12: mod_base = OTHER; note = 2'-O-methylguanosine-3'-phosphate
  modified_base 13: mod_base = OTHER; note = 2'-O-methyladenosine-3'-phosphate
  modified_base 14: mod_base = OTHER; note = 2'-deoxy-2'-fluoroguanosine-3'-phosphate
  modified_base 15: mod_base = OTHER; note = 2'-O-methylcytidine-3'-phosphate
  modified_base 16: mod_base = OTHER; note = 2'-deoxy-2'-fluoroadenosine-3'-phosphate
  modified_base 17: mod_base = OTHER; note = 2'-O-methylcytidine-3'-phosphate
  modified_base 18: mod_base = OTHER; note = 2'-O-methyladenosine-3'-phosphate
  modified_base 19: mod_base = OTHER; note = 2'-O-methylguanosine-3'-phosphate
  modified_base 20: mod_base = OTHER; note = 2'-O-methyladenosine-3'-phosphate
  modified_base 21: mod_base = OTHER; note = 2'-O-methyluridine-3'-phosphorothioate
  modified_base 22: mod_base = OTHER; note = 2'-O-methylguanosine-3'-phosphorothioate
  modified_base 23: mod_base = OTHER; note = 2'-O-methylguanosine
  misc_feature 1..4: note = RNA
  misc_feature 6..23: note = RNA
  misc_feature 5: note = DNA
tagatgacgaagagcacagatgg

SEQ ID NO: 1149 - DNA, 23 bp, synthetic construct
  source 1..23: mol_type = other DNA
  modified_base 1: mod_base = OTHER; note = 2'-O-methyluridine-3'-phosphate 5'-(E)-Vinylphosphonate
  modified_base 3: mod_base = OTHER; note = 2'-O-methyladenosine-3'-phosphate
  modified_base 4: mod_base = OTHER; note = 2'-O-methylguanosine-3'-phosphate
  modified_base 6: mod_base = OTHER; note = 2'-O-methyluridine-3'-phosphate
  modified_base 8: mod_base = OTHER; note = 2'-O-methyladenosine-3'-phosphate
  modified_base 9: mod_base = OTHER; note = 2'-O-methylcytidine-3'-phosphate
  modified_base 10: mod_base = OTHER; note = 2'-O-methylguanosine-3'-phosphate
  modified_base 11: mod_base = OTHER; note = 2'-O-methyladenosine-3'-phosphate
  modified_base 13: mod_base = OTHER; note = 2'-O-methylguanosine-3'-phosphate
  modified_base 14: mod_base = OTHER; note = 2'-deoxy-2'-fluoroadenosine-3'-phosphate
  modified_base 15: mod_base = OTHER; note = 2'-O-methylguanosine-3'-phosphate
  modified_base 16: mod_base = OTHER; note = 2'-O-methylcytidine-3'-phosphate
  modified_base 17: mod_base = OTHER; note = 2'-O-methyladenosine-3'-phosphate
  modified_base 18: mod_base = OTHER; note = 2'-O-methylcytidine-3'-phosphate
  modified_base 19: mod_base = OTHER; note = 2'-O-methyladenosine-3'-phosphate
  modified_base 20: mod_base = OTHER; note = 2'-O-methylguanosine-3'-phosphate
  modified_base 21: mod_base = OTHER; note = 2'-O-methyladenosine-3'-phosphorothioate
  modified_base 22: mod_base = OTHER; note = 2'-O-methyluridine-3'-phosphorothioate
  modified_base 23: mod_base = OTHER; note = 2'-O-methylguanosine
  misc_feature 1: note = RNA
  misc_feature 3..4: note = RNA
  misc_feature 6: note = RNA
  misc_feature 8..11: note = RNA
  misc_feature 13..23: note = RNA
  misc_feature 2: note = DNA
  misc_feature 5: note = DNA
  misc_feature 7: note = DNA
  misc_feature 12: note = DNA
tcagatgacgaagagcacagatg

SEQ ID NO: 1150 - DNA, 23 bp, synthetic construct
  source 1..23: mol_type = other DNA
  modified_base 1: mod_base = OTHER; note = 2'-O-methyluridine-3'-phosphate 5'-(E)-Vinylphosphonate
  modified_base 2: mod_base = OTHER; note = 2'-deoxy-2'-fluorouridine-3'-phosphate
  modified_base 3: mod_base = OTHER; note = 2'-O-methylcytidine-3'-phosphate
  modified_base 4: mod_base = OTHER; note = 2'-O-methyladenosine-3'-phosphate
  modified_base 6: mod_base = OTHER; note = 2'-O-methyladenosine-3'-phosphate
  modified_base 7: mod_base = OTHER; note = Thymidine-glycol nucleic acid (GNA), S-Isomer
  modified_base 8: mod_base = OTHER; note = 2'-O-methylguanosine-3'-phosphate
  modified_base 9: mod_base = OTHER; note = 2'-O-methyladenosine-3'-phosphate
  modified_base 10: mod_base = OTHER; note = 2'-O-methylcytidine-3'-phosphate
  modified_base 11: mod_base = OTHER; note = 2'-O-methylguanosine-3'-phosphate
  modified_base 12: mod_base = OTHER; note = 2'-O-methyladenosine-3'-phosphate
  modified_base 13: mod_base = OTHER; note = 2'-O-methyladenosine-3'-phosphate
  modified_base 14: mod_base = OTHER; note = 2'-deoxy-2'-fluoroguanosine-3'-phosphate
  modified_base 15: mod_base = OTHER; note = 2'-O-methyladenosine-3'-phosphate
  modified_base 16: mod_base = OTHER; note = 2'-deoxy-2'-fluoroguanosine-3'-phosphate
  modified_base 17: mod_base = OTHER; note = 2'-O-methylcytidine-3'-phosphate
  modified_base 18: mod_base = OTHER; note = 2'-O-methyladenosine-3'-phosphate
  modified_base 19: mod_base = OTHER; note = 2'-O-methylcytidine-3'-phosphate
  modified_base 20: mod_base = OTHER; note = 2'-O-methyladenosine-3'-phosphate
  modified_base 21: mod_base = OTHER; note = 2'-O-methylguanosine-3'-phosphorothioate
  modified_base 22: mod_base = OTHER; note = 2'-O-methyladenosine-3'-phosphorothioate
  modified_base 23: mod_base = OTHER; note = 2'-O-methyluridine
  misc_feature 1..4: note = RNA
  misc_feature 6..23: note = RNA
  misc_feature 5: note = DNA
ttcagatgacgaagagcacagat

SEQ ID NO: 1151 - DNA, 23 bp, synthetic construct
  source 1..23: mol_type = other DNA
  modified_base 1: mod_base = OTHER; note = 2'-O-methyluridine-3'-phosphate 5'-(E)-Vinylphosphonate
  modified_base 2: mod_base = OTHER; note = 2'-deoxy-2'-fluoroguanosine-3'-phosphate
  modified_base 3: mod_base = OTHER; note = 2'-O-methyluridine-3'-phosphate
  modified_base 4: mod_base = OTHER; note = 2'-O-methylcytidine-3'-phosphate
  modified_base 6: mod_base = OTHER; note = 2'-O-methylguanosine-3'-phosphate
  modified_base 7: mod_base = OTHER; note = Adenosine-glycol nucleic acid (GNA), S-isomer
  modified_base 8: mod_base = OTHER; note = 2'-O-methyluridine-3'-phosphate
  modified_base 9: mod_base = OTHER; note = 2'-O-methylguanosine-3'-phosphate
  modified_base 10: mod_base = OTHER; note = 2'-O-methyladenosine-3'-phosphate
  modified_base 11: mod_base = OTHER; note = 2'-O-methylcytidine-3'-phosphate
  modified_base 12: mod_base = OTHER; note = 2'-O-methylguanosine-3'-phosphate
  modified_base 13: mod_base = OTHER; note = 2'-O-methyladenosine-3'-phosphate
  modified_base 14: mod_base = OTHER; note = 2'-deoxy-2'-fluoroadenosine-3'-phosphate
  modified_base 15: mod_base = OTHER; note = 2'-O-methylguanosine-3'-phosphate
  modified_base 16: mod_base = OTHER; note = 2'-deoxy-2'-fluoroadenosine-3'-phosphate
  modified_base 17: mod_base = OTHER; note = 2'-O-methylguanosine-3'-phosphate
  modified_base 18: mod_base = OTHER; note = 2'-O-methylcytidine-3'-phosphate
  modified_base 19: mod_base = OTHER; note = 2'-O-methyladenosine-3'-phosphate
  modified_base 20: mod_base = OTHER; note = 2'-O-methylcytidine-3'-phosphate
  modified_base 21: mod_base = OTHER; note = 2'-O-methyladenosine-3'-phosphorothioate
  modified_base 22: mod_base = OTHER; note = 2'-O-methylguanosine-3'-phosphorothioate
  modified_base 23: mod_base = OTHER; note = 2'-O-methyladenosine
  misc_feature 1..4: note = RNA
  misc_feature 6..23: note = RNA
  misc_feature 5: note = DNA
tgtcagatgacgaagagcacaga

SEQ ID NO: 1152 - DNA, 23 bp, synthetic construct
  source 1..23: mol_type = other DNA
  modified_base 1: mod_base = OTHER; note = 2'-O-methyluridine-3'-phosphate 5'-(E)-Vinylphosphonate
  modified_base 2: mod_base = OTHER; note = 2'-deoxy-2'-fluorouridine-3'-phosphate
  modified_base 3: mod_base = OTHER; note = 2'-O-methyladenosine-3'-phosphate
  modified_base 4: mod_base = OTHER; note = 2'-O-methyladenosine-3'-phosphate
  modified_base 6: mod_base = OTHER; note = 2'-O-methylcytidine-3'-phosphate
  modified_base 7: mod_base = OTHER; note = Adenosine-glycol nucleic acid (GNA), S-isomer
  modified_base 8: mod_base = OTHER; note = 2'-O-methylcytidine-3'-phosphate
  modified_base 9: mod_base = OTHER; note = 2'-O-methyladenosine-3'-phosphate
  modified_base 10: mod_base = OTHER; note = 2'-O-methyladenosine-3'-phosphate
  modified_base 11: mod_base = OTHER; note = 2'-O-methylcytidine-3'-phosphate
  modified_base 12: mod_base = OTHER; note = 2'-O-methyluridine-3'-phosphate
  modified_base 13: mod_base = OTHER; note = 2'-O-methylguanosine-3'-phosphate
  modified_base 14: mod_base = OTHER; note = 2'-deoxy-2'-fluoroguanosine-3'-phosphate
  modified_base 15: mod_base = OTHER; note = 2'-O-methyluridine-3'-phosphate
  modified_base 16: mod_base = OTHER; note = 2'-deoxy-2'-fluoroadenosine-3'-phosphate
  modified_base 17: mod_base = OTHER; note = 2'-O-methylguanosine-3'-phosphate
  modified_base 18: mod_base = OTHER; note = 2'-O-methyluridine-3'-phosphate
  modified_base 19: mod_base = OTHER; note = 2'-O-methylcytidine-3'-phosphate
  modified_base 20: mod_base = OTHER; note = 2'-O-methylcytidine-3'-phosphate
  modified_base 21: mod_base = OTHER; note = 2'-O-methyladenosine-3'-phosphorothioate
  modified_base 22: mod_base = OTHER; note = 2'-O-methyluridine-3'-phosphorothioate
  modified_base 23: mod_base = OTHER; note = 2'-O-methyladenosine
  misc_feature 1..4: note = RNA
  misc_feature 6..23: note = RNA
  misc_feature 5: note = DNA
ttaaccacaactggtagtccata

SEQ ID NO: 1153 - DNA, 23 bp, synthetic construct
  source 1..23: mol_type = other DNA
  modified_base 1: mod_base = OTHER; note = 2'-O-methyluridine-3'-phosphate 5'-(E)-Vinylphosphonate
  modified_base 3: mod_base = OTHER; note = 2'-O-methyluridine-3'-phosphate
  modified_base 4: mod_base = OTHER; note = 2'-O-methyluridine-3'-phosphate
  modified_base 6: mod_base = OTHER; note = 2'-O-methyladenosine-3'-phosphate
  modified_base 8: mod_base = OTHER; note = 2'-O-methylcytidine-3'-phosphate
  modified_base 9: mod_base = OTHER; note = 2'-O-methyladenosine-3'-phosphate
  modified_base 10: mod_base = OTHER; note = 2'-O-methylcytidine-3'-phosphate
  modified_base 11: mod_base = OTHER; note = 2'-O-methyladenosine-3'-phosphate
  modified_base 13: mod_base = OTHER; note = 2'-O-methylcytidine-3'-phosphate
  modified_base 14: mod_base = OTHER; note = 2'-deoxy-2'-fluorouridine-3'-phosphate
  modified_base 15: mod_base = OTHER; note = 2'-O-methylguanosine-3'-phosphate
  modified_base 16: mod_base = OTHER; note = 2'-O-methylguanosine-3'-phosphate
  modified_base 17: mod_base = OTHER; note = 2'-O-methyluridine-3'-phosphate
  modified_base 18: mod_base = OTHER; note = 2'-O-methyladenosine-3'-phosphate
  modified_base 19: mod_base = OTHER; note = 2'-O-methylguanosine-3'-phosphate
  modified_base 20: mod_base = OTHER; note = 2'-O-methyluridine-3'-phosphate
  modified_base 21: mod_base = OTHER; note = 2'-O-methylcytidine-3'-phosphorothioate
  modified_base 22: mod_base = OTHER; note = 2'-O-methylcytidine-3'-phosphorothioate
  modified_base 23: mod_base = OTHER; note = 2'-O-methyladenosine
  misc_feature 1: note = RNA
  misc_feature 3..4: note = RNA
  misc_feature 6: note = RNA
  misc_feature 8..11: note = RNA
  misc_feature 13..23: note = RNA
  misc_feature 2: note = DNA
  misc_feature 5: note = DNA
  misc_feature 7: note = DNA
  misc_feature 12: note = DNA
tcttaaccacaactggtagtcca

SEQ ID NO: 1154 - DNA, 23 bp, synthetic construct
  source 1..23: mol_type = other DNA
  modified_base 1: mod_base = OTHER; note = 2'-O-methyluridine-3'-phosphate 5'-(E)-Vinylphosphonate
  modified_base 2: mod_base = OTHER; note = 2'-deoxy-2'-fluoroguanosine-3'-phosphate
  modified_base 3: mod_base = OTHER; note = 2'-O-methylguanosine-3'-phosphate
  modified_base 4: mod_base = OTHER; note = 2'-O-methyluridine-3'-phosphate
  modified_base 6: mod_base = OTHER; note = 2'-O-methyluridine-3'-phosphate
  modified_base 7: mod_base = OTHER; note = Adenosine-glycol nucleic acid (GNA), S-isomer
  modified_base 8: mod_base = OTHER; note = 2'-O-methyladenosine-3'-phosphate
  modified_base 9: mod_base = OTHER; note = 2'-O-methylguanosine-3'-phosphate
  modified_base 10: mod_base = OTHER; note = 2'-O-methyladenosine-3'-phosphate
  modified_base 11: mod_base = OTHER; note = 2'-O-methylguanosine-3'-phosphate
  modified_base 12: mod_base = OTHER; note = 2'-O-methylcytidine-3'-phosphate
  modified_base 13: mod_base = OTHER; note = 2'-O-methyluridine-3'-phosphate
  modified_base 14: mod_base = OTHER; note = 2'-deoxy-2'-fluorouridine-3'-phosphate
  modified_base 15: mod_base = OTHER; note = 2'-O-methyladenosine-3'-phosphate
  modified_base 16: mod_base = OTHER; note = 2'-deoxy-2'-fluoroadenosine-3'-phosphate
  modified_base 17: mod_base = OTHER; note = 2'-O-methylcytidine-3'-phosphate
  modified_base 18: mod_base = OTHER; note = 2'-O-methylcytidine-3'-phosphate
  modified_base 19: mod_base = OTHER; note = 2'-O-methyladenosine-3'-phosphate
  modified_base 20: mod_base = OTHER; note = 2'-O-methylcytidine-3'-phosphate
  modified_base 21: mod_base = OTHER; note = 2'-O-methyladenosine-3'-phosphorothioate
  modified_base 22: mod_base = OTHER; note = 2'-O-methyladenosine-3'-phosphorothioate
  modified_base 23: mod_base = OTHER; note = 2'-O-methylcytidine
  misc_feature 1..4: note = RNA
  misc_feature 6..23: note = RNA
  misc_feature 5: note = DNA
tggtgtaagagcttaaccacaac

SEQ ID NO: 1155 - DNA, 23 bp, synthetic construct
  source 1..23: mol_type = other DNA
  modified_base 1: mod_base = OTHER; note = 2'-O-methyluridine-3'-phosphate 5'-(E)-Vinylphosphonate
  modified_base 3: mod_base = OTHER; note = 2'-O-methyluridine-3'-phosphate
  modified_base 4: mod_base = OTHER; note = 2'-O-methylcytidine-3'-phosphate
  modified_base 6: mod_base = OTHER; note = 2'-O-methyladenosine-3'-phosphate
  modified_base 8: mod_base = OTHER; note = 2'-O-methylcytidine-3'-phosphate
  modified_base 9: mod_base = OTHER; note = 2'-O-methyladenosine-3'-phosphate
  modified_base 10: mod_base = OTHER; note = 2'-O-methylguanosine-3'-phosphate
  modified_base 11: mod_base = OTHER; note = 2'-O-methyluridine-3'-phosphate
  modified_base 13: mod_base = OTHER; note = 2'-O-methylguanosine-3'-phosphate
  modified_base 14: mod_base = OTHER; note = 2'-deoxy-2'-fluorocytidine-3'-phosphate
  modified_base 15: mod_base = OTHER; note = 2'-O-methylcytidine-3'-phosphate
  modified_base 16: mod_base = OTHER; note = 2'-O-methyluridine-3'-phosphate
  modified_base 17: mod_base = OTHER; note = 2'-O-methyluridine-3'-phosphate
  modified_base 18: mod_base = OTHER; note = 2'-O-methyluridine-3'-phosphate
  modified_base 19: mod_base = OTHER; note = 2'-O-methyladenosine-3'-phosphate
  modified_base 20: mod_base = OTHER; note = 2'-O-methyluridine-3'-phosphate
  modified_base 21: mod_base = OTHER; note = 2'-O-methylcytidine-3'-phosphorothioate
  modified_base 22: mod_base = OTHER; note = 2'-O-methyladenosine-3'-phosphorothioate
  modified_base 23: mod_base = OTHER; note = 2'-O-methylguanosine
  misc_feature 1: note = RNA
  misc_feature 3..4: note = RNA
  misc_feature 6: note = RNA
  misc_feature 8..11: note = RNA
  misc_feature 13..23: note = RNA
  misc_feature 2: note = DNA
  misc_feature 5: note = DNA
  misc_feature 7: note = DNA
  misc_feature 12: note = DNA
tatccaacagtagcctttatcag

SEQ ID NO: 1156 - DNA, 23 bp, synthetic construct
  source 1..23: mol_type = other DNA
  modified_base 1: mod_base = OTHER; note = 2'-O-methyluridine-3'-phosphate 5'-(E)-Vinylphosphonate
  modified_base 2: mod_base = OTHER; note = 2'-deoxy-2'-fluoroadenosine-3'-phosphate
  modified_base 3: mod_base = OTHER; note = 2'-O-methyladenosine-3'-phosphate
  modified_base 4: mod_base = OTHER; note = 2'-O-methyluridine-3'-phosphate
  modified_base 6: mod_base = OTHER; note = 2'-O-methylcytidine-3'-phosphate
  modified_base 7: mod_base = OTHER; note = Adenosine-glycol nucleic acid (GNA), S-isomer
  modified_base 8: mod_base = OTHER; note = 2'-O-methyladenosine-3'-phosphate
  modified_base 9: mod_base = OTHER; note = 2'-O-methylcytidine-3'-phosphate
  modified_base 10: mod_base = OTHER; note = 2'-O-methyladenosine-3'-phosphate
  modified_base 11: mod_base = OTHER; note = 2'-O-methylguanosine-3'-phosphate
  modified_base 12: mod_base = OTHER; note = 2'-O-methyluridine-3'-phosphate
  modified_base 13: mod_base = OTHER; note = 2'-O-methyladenosine-3'-phosphate
  modified_base 14: mod_base = OTHER; note = 2'-deoxy-2'-fluoroguanosine-3'-phosphate
  modified_base 15: mod_base = OTHER; note = 2'-O-methylcytidine-3'-phosphate
  modified_base 16: mod_base = OTHER; note = 2'-deoxy-2'-fluorocytidine-3'-phosphate
  modified_base 17: mod_base = OTHER; note = 2'-O-methyluridine-3'-phosphate
  modified_base 18: mod_base = OTHER; note = 2'-O-methyluridine-3'-phosphate
  modified_base 19: mod_base = OTHER; note = 2'-O-methyluridine-3'-phosphate
  modified_base 20: mod_base = OTHER; note = 2'-O-methyladenosine-3'-phosphate
  modified_base 21: mod_base = OTHER; note = 2'-O-methyluridine-3'-phosphorothioate
  modified_base 22: mod_base = OTHER; note = 2'-O-methylcytidine-3'-phosphorothioate
  modified_base 23: mod_base = OTHER; note = 2'-O-methyladenosine
  misc_feature 1..4: note = RNA
  misc_feature 6..23: note = RNA
  misc_feature 5: note = DNA
taatccaacagtagcctttatca

SEQ ID NO: 1157 - DNA, 23 bp, synthetic construct
  source 1..23: mol_type = other DNA
  modified_base 1: mod_base = OTHER; note = 2'-O-methyluridine-3'-phosphate 5'-(E)-Vinylphosphonate
  modified_base 3: mod_base = OTHER; note = 2'-O-methyladenosine-3'-phosphate
  modified_base 4: mod_base = OTHER; note = 2'-O-methyluridine-3'-phosphate
  modified_base 6: mod_base = OTHER; note = 2'-O-methylcytidine-3'-phosphate
  modified_base 8: mod_base = OTHER; note = 2'-O-methyladenosine-3'-phosphate
  modified_base 9: mod_base = OTHER; note = 2'-O-methylcytidine-3'-phosphate
  modified_base 10: mod_base = OTHER; note = 2'-O-methyladenosine-3'-phosphate
  modified_base 11: mod_base = OTHER; note = 2'-O-methylguanosine-3'-phosphate
  modified_base 13: mod_base = OTHER; note = 2'-O-methyladenosine-3'-phosphate
  modified_base 14: mod_base = OTHER; note = 2'-deoxy-2'-fluoroguanosine-3'-phosphate
  modified_base 15: mod_base = OTHER; note = 2'-O-methylcytidine-3'-phosphate
  modified_base 16: mod_base = OTHER; note = 2'-O-methylcytidine-3'-phosphate
  modified_base 17: mod_base = OTHER; note = 2'-O-methyluridine-3'-phosphate
  modified_base 18: mod_base = OTHER; note = 2'-O-methyluridine-3'-phosphate
  modified_base 19: mod_base = OTHER; note = 2'-O-methyluridine-3'-phosphate
  modified_base 20: mod_base = OTHER; note = 2'-O-methyladenosine-3'-phosphate
  modified_base 21: mod_base = OTHER; note = 2'-O-methyluridine-3'-phosphorothioate
  modified_base 22: mod_base = OTHER; note = 2'-O-methylcytidine-3'-phosphorothioate
  modified_base 23: mod_base = OTHER; note = 2'-O-methyladenosine
  misc_feature 1: note = RNA
  misc_feature 3..4: note = RNA
  misc_feature 6: note = RNA
  misc_feature 8..11: note = RNA
  misc_feature 13..23: note = RNA
  misc_feature 2: note = DNA
  misc_feature 5: note = DNA
  misc_feature 7: note = DNA
  misc_feature 12: note = DNA
taatccaacagtagcctttatca

SEQ ID NO: 1158 - DNA, 23 bp, synthetic construct
  source 1..23: mol_type = other DNA
  modified_base 1: mod_base = OTHER; note = 2'-O-methyluridine-3'-phosphate 5'-(E)-Vinylphosphonate
  modified_base 2: mod_base = OTHER; note = 2'-deoxy-2'-fluoroadenosine-3'-phosphate
  modified_base 3: mod_base = OTHER; note = 2'-O-methyluridine-3'-phosphate
  modified_base 4: mod_base = OTHER; note = 2'-O-methylcytidine-3'-phosphate
  modified_base 6: mod_base = OTHER; note = 2'-O-methyladenosine-3'-phosphate
  modified_base 7: mod_base = OTHER; note = Thymidine-glycol nucleic acid (GNA), S-Isomer
  modified_base 8: mod_base = OTHER; note = 2'-O-methylcytidine-3'-phosphate
  modified_base 9: mod_base = OTHER; note = 2'-O-methylcytidine-3'-phosphate
  modified_base 10: mod_base = OTHER; note = 2'-O-methyladenosine-3'-phosphate
  modified_base 11: mod_base = OTHER; note = 2'-O-methyladenosine-3'-phosphate
  modified_base 12: mod_base = OTHER; note = 2'-O-methylcytidine-3'-phosphate
  modified_base 13: mod_base = OTHER; note = 2'-O-methyladenosine-3'-phosphate
  modified_base 14: mod_base = OTHER; note = 2'-deoxy-2'-fluoroguanosine-3'-phosphate
  modified_base 15: mod_base = OTHER; note = 2'-O-methyluridine-3'-phosphate
  modified_base 16: mod_base = OTHER; note = 2'-deoxy-2'-fluoroadenosine-3'-phosphate
  modified_base 17: mod_base = OTHER; note = 2'-O-methylguanosine-3'-phosphate
  modified_base 18: mod_base = OTHER; note = 2'-O-methylcytidine-3'-phosphate
  modified_base 19: mod_base = OTHER; note = 2'-O-methylcytidine-3'-phosphate
  modified_base 20: mod_base = OTHER; note = 2'-O-methyluridine-3'-phosphate
  modified_base 21: mod_base = OTHER; note = 2'-O-methyluridine-3'-phosphorothioate
  modified_base 22: mod_base = OTHER; note = 2'-O-methyluridine-3'-phosphorothioate
  modified_base 23: mod_base = OTHER; note = 2'-O-methyladenosine
  misc_feature 1..4: note = RNA
  misc_feature 6..23: note = RNA
  misc_feature 5: note = DNA
tatcaatccaacagtagccttta

SEQ ID NO: 1159 - DNA, 23 bp, synthetic construct
  source 1..23: mol_type = other DNA
  modified_base 1: mod_base = OTHER; note = 2'-O-methyluridine-3'-phosphate 5'-(E)-Vinylphosphonate
  modified_base 3: mod_base = OTHER; note = 2'-O-methyluridine-3'-phosphate
  modified_base 4: mod_base = OTHER; note = 2'-O-methylcytidine-3'-phosphate
  modified_base 6: mod_base = OTHER; note = 2'-O-methyladenosine-3'-phosphate
  modified_base 8: mod_base = OTHER; note = 2'-O-methylcytidine-3'-phosphate
  modified_base 9: mod_base = OTHER; note = 2'-O-methylcytidine-3'-phosphate
  modified_base 10: mod_base = OTHER; note = 2'-O-methyladenosine-3'-phosphate
  modified_base 11: mod_base = OTHER; note = 2'-O-methyladenosine-3'-phosphate
  modified_base 13: mod_base = OTHER; note = 2'-O-methyladenosine-3'-phosphate
  modified_base 14: mod_base = OTHER; note = 2'-deoxy-2'-fluoroguanosine-3'-phosphate
  modified_base 15: mod_base = OTHER; note = 2'-O-methyluridine-3'-phosphate
  modified_base 16: mod_base = OTHER; note = 2'-O-methyladenosine-3'-phosphate
  modified_base 17: mod_base = OTHER; note = 2'-O-methylguanosine-3'-phosphate
  modified_base 18: mod_base = OTHER; note = 2'-O-methylcytidine-3'-phosphate
  modified_base 19: mod_base = OTHER; note = 2'-O-methylcytidine-3'-phosphate
  modified_base 20: mod_base = OTHER; note = 2'-O-methyluridine-3'-phosphate
  modified_base 21: mod_base = OTHER; note = 2'-O-methyluridine-3'-phosphorothioate
  modified_base 22: mod_base = OTHER; note = 2'-O-methyluridine-3'-phosphorothioate
  modified_base 23: mod_base = OTHER; note = 2'-O-methyladenosine
  misc_feature 1: note = RNA
  misc_feature 3..4: note = RNA
  misc_feature 6: note = RNA
  misc_feature 8..11: note = RNA
  misc_feature 13..23: note = RNA
  misc_feature 2: note = DNA
  misc_feature 5: note = DNA
  misc_feature 7: note = DNA
  misc_feature 12: note = DNA
tatcaatccaacagtagccttta

SEQ ID NO: 1160 - DNA, 23 bp, synthetic construct
  source 1..23: mol_type = other DNA
  modified_base 1: mod_base = OTHER; note = 2'-O-methyluridine-3'-phosphate 5'-(E)-Vinylphosphonate
  modified_base 3: mod_base = OTHER; note = 2'-O-methyladenosine-3'-phosphate
  modified_base 4: mod_base = OTHER; note = 2'-O-methyluridine-3'-phosphate
  modified_base 6: mod_base = OTHER; note = 2'-O-methyladenosine-3'-phosphate
  modified_base 8: mod_base = OTHER; note = 2'-O-methyluridine-3'-phosphate
  modified_base 9: mod_base = OTHER; note = 2'-O-methylcytidine-3'-phosphate
  modified_base 10: mod_base = OTHER; note = 2'-O-methylcytidine-3'-phosphate
  modified_base 11: mod_base = OTHER; note = 2'-O-methyladenosine-3'-phosphate
  modified_base 13: mod_base = OTHER; note = 2'-O-methylcytidine-3'-phosphate
  modified_base 14: mod_base = OTHER; note = 2'-deoxy-2'-fluoroadenosine-3'-phosphate
  modified_base 15: mod_base = OTHER; note = 2'-O-methylguanosine-3'-phosphate
  modified_base 16: mod_base = OTHER; note = 2'-O-methyluridine-3'-phosphate
  modified_base 17: mod_base = OTHER; note = 2'-O-methyladenosine-3'-phosphate
  modified_base 18: mod_base = OTHER; note = 2'-O-methylguanosine-3'-phosphate
  modified_base 19: mod_base = OTHER; note = 2'-O-methylcytidine-3'-phosphate
  modified_base 20: mod_base = OTHER; note = 2'-O-methylcytidine-3'-phosphate
  modified_base 21: mod_base = OTHER; note = 2'-O-methyluridine-3'-phosphorothioate
  modified_base 22: mod_base = OTHER; note = 2'-O-methyluridine-3'-phosphorothioate
  modified_base 23: mod_base = OTHER; note = 2'-O-methyluridine
  misc_feature 1: note = RNA
  misc_feature 3..4: note = RNA
  misc_feature 6: note = RNA
  misc_feature 8..11: note = RNA
  misc_feature 13..23: note = RNA
  misc_feature 2: note = DNA
  misc_feature 5: note = DNA
  misc_feature 7: note = DNA
  misc_feature 12: note = DNA
taatcaatccaacagtagccttt

SEQ ID NO: 1161 - DNA, 23 bp, synthetic construct
  source 1..23: mol_type = other DNA
  modified_base 1: mod_base = OTHER; note = 2'-O-methyluridine-3'-phosphate 5'-(E)-Vinylphosphonate
  modified_base 2: mod_base = OTHER; note = 2'-deoxy-2'-fluoroguanosine-3'-phosphate
  modified_base 3: mod_base = OTHER; note = 2'-O-methyladenosine-3'-phosphate
  modified_base 4: mod_base = OTHER; note = 2'-O-methyladenosine-3'-phosphate
  modified_base 6: mod_base = OTHER; note = 2'-O-methylcytidine-3'-phosphate
  modified_base 7: mod_base = OTHER; note = Adenosine-glycol nucleic acid (GNA), S-isomer
  modified_base 8: mod_base = OTHER; note = 2'-O-methyladenosine-3'-phosphate
  modified_base 9: mod_base = OTHER; note = 2'-O-methyluridine-3'-phosphate
  modified_base 10: mod_base = OTHER; note = 2'-O-methylcytidine-3'-phosphate
  modified_base 11: mod_base = OTHER; note = 2'-O-methylcytidine-3'-phosphate
  modified_base 12: mod_base = OTHER; note = 2'-O-methyladenosine-3'-phosphate
  modified_base 13: mod_base = OTHER; note = 2'-O-methyladenosine-3'-phosphate
  modified_base 14: mod_base = OTHER; note = 2'-deoxy-2'-fluorocytidine-3'-phosphate
  modified_base 15: mod_base = OTHER; note = 2'-O-methyladenosine-3'-phosphate
  modified_base 16: mod_base = OTHER; note = 2'-deoxy-2'-fluoroguanosine-3'-phosphate
  modified_base 17: mod_base = OTHER; note = 2'-O-methyluridine-3'-phosphate
  modified_base 18: mod_base = OTHER; note = 2'-O-methyladenosine-3'-phosphate
  modified_base 19: mod_base = OTHER; note = 2'-O-methylguanosine-3'-phosphate
  modified_base 20: mod_base = OTHER; note = 2'-O-methylcytidine-3'-phosphate
  modified_base 21: mod_base = OTHER; note = 2'-O-methylcytidine-3'-phosphorothioate
  modified_base 22: mod_base = OTHER; note = 2'-O-methyluridine-3'-phosphorothioate
  modified_base 23: mod_base = OTHER; note = 2'-O-methyluridine
  misc_feature 1..4: note = RNA
  misc_feature 6..23: note = RNA
  misc_feature 5: note = DNA
tgaatcaatccaacagtagcctt

SEQ ID NO: 1162 - DNA, 23 bp, synthetic construct
  source 1..23: mol_type = other DNA
  modified_base 1: mod_base = OTHER; note = 2'-O-methyluridine-3'-phosphate 5'-(E)-Vinylphosphonate
  modified_base 3: mod_base = OTHER; note = 2'-O-methylguanosine-3'-phosphate
  modified_base 4: mod_base = OTHER; note = 2'-O-methyladenosine-3'-phosphate
  modified_base 6: mod_base = OTHER; note = 2'-O-methyluridine-3'-phosphate
  modified_base 8: mod_base = OTHER; note = 2'-O-methyladenosine-3'-phosphate
  modified_base 9: mod_base = OTHER; note = 2'-O-methyladenosine-3'-phosphate
  modified_base 10: mod_base = OTHER; note = 2'-O-methyluridine-3'-phosphate
  modified_base 11: mod_base = OTHER; note = 2'-O-methylcytidine-3'-phosphate
  modified_base 13: mod_base = OTHER; note = 2'-O-methyladenosine-3'-phosphate
  modified_base 14: mod_base = OTHER; note = 2'-deoxy-2'-fluoroadenosine-3'-phosphate
  modified_base 15: mod_base = OTHER; note = 2'-O-methylcytidine-3'-phosphate
  modified_base 16: mod_base = OTHER; note = 2'-O-methyladenosine-3'-phosphate
  modified_base 17: mod_base = OTHER; note = 2'-O-methylguanosine-3'-phosphate
  modified_base 18: mod_base = OTHER; note = 2'-O-methyluridine-3'-phosphate
  modified_base 19: mod_base = OTHER; note = 2'-O-methyladenosine-3'-phosphate
  modified_base 20: mod_base = OTHER; note = 2'-O-methylguanosine-3'-phosphate
  modified_base 21: mod_base = OTHER; note = 2'-O-methylcytidine-3'-phosphorothioate
  modified_base 22: mod_base = OTHER; note = 2'-O-methylcytidine-3'-phosphorothioate
  modified_base 23: mod_base = OTHER; note = 2'-O-methyluridine
  misc_feature 1: note = RNA
  misc_feature 3..4: note = RNA
  misc_feature 6: note = RNA
  misc_feature 8..11: note = RNA
  misc_feature 13..23: note = RNA
  misc_feature 2: note = DNA
  misc_feature 5: note = DNA
  misc_feature 7: note = DNA
  misc_feature 12: note = DNA
tcgaatcaatccaacagtagcct

SEQ ID NO: 1163 - DNA, 23 bp, synthetic construct
  source 1..23: mol_type = other DNA
  modified_base 1: mod_base = OTHER; note = 2'-O-methyluridine-3'-phosphate 5'-(E)-Vinylphosphonate
  modified_base 3: mod_base = OTHER; note = 2'-O-methylcytidine-3'-phosphate
  modified_base 4: mod_base = OTHER; note = 2'-O-methylguanosine-3'-phosphate
  modified_base 6: mod_base = OTHER; note = 2'-O-methyladenosine-3'-phosphate
  modified_base 8: mod_base = OTHER; note = 2'-O-methylcytidine-3'-phosphate
  modified_base 9: mod_base = OTHER; note = 2'-O-methyladenosine-3'-phosphate
  modified_base 10: mod_base = OTHER; note = 2'-O-methyladenosine-3'-phosphate
  modified_base 11: mod_base = OTHER; note = 2'-O-methyluridine-3'-phosphate
  modified_base 13: mod_base = OTHER; note = 2'-O-methylcytidine-3'-phosphate
  modified_base 14: mod_base = OTHER; note = 2'-deoxy-2'-fluoroadenosine-3'-phosphate
  modified_base 15: mod_base = OTHER; note = 2'-O-methyladenosine-3'-phosphate
  modified_base 16: mod_base = OTHER; note = 2'-O-methylcytidine-3'-phosphate
  modified_base 17: mod_base = OTHER; note = 2'-O-methyladenosine-3'-phosphate
  modified_base 18: mod_base = OTHER; note = 2'-O-methylguanosine-3'-phosphate
  modified_base 19: mod_base = OTHER; note = 2'-O-methyluridine-3'-phosphate
  modified_base 20: mod_base = OTHER; note = 2'-O-methyladenosine-3'-phosphate
  modified_base 21: mod_base = OTHER; note = 2'-O-methylguanosine-3'-phosphorothioate
  modified_base 22: mod_base = OTHER; note = 2'-O-methylcytidine-3'-phosphorothioate
  modified_base 23: mod_base = OTHER; note = 2'-O-methylcytidine
  misc_feature 1: note = RNA
  misc_feature 3..4: note = RNA
  misc_feature 6: note = RNA
  misc_feature 8..11: note = RNA
  misc_feature 13..23: note = RNA
  misc_feature 2: note = DNA
  misc_feature 5: note = DNA
  misc_feature 7: note = DNA
  misc_feature 12: note = DNA
ttcgaatcaatccaacagtagcc

SEQ ID NO: 1164 - DNA, 23 bp, synthetic construct
  source 1..23: mol_type = other DNA
  modified_base 1: mod_base = OTHER; note = 2'-O-methyluridine-3'-phosphate 5'-(E)-Vinylphosphonate
  modified_base 3: mod_base = OTHER; note = 2'-O-methyluridine-3'-phosphate
  modified_base 4: mod_base = OTHER; note = 2'-O-methylcytidine-3'-phosphate
  modified_base 6: mod_base = OTHER; note = 2'-O-methyladenosine-3'-phosphate
  modified_base 8: mod_base = OTHER; note = 2'-O-methyluridine-3'-phosphate
  modified_base 9: mod_base = OTHER; note = 2'-O-methylcytidine-3'-phosphate
  modified_base 10: mod_base = OTHER; note = 2'-O-methyladenosine-3'-phosphate
  modified_base 11: mod_base = OTHER; note = 2'-O-methyladenosine-3'-phosphate
  modified_base 13: mod_base = OTHER; note = 2'-O-methylcytidine-3'-phosphate
  modified_base 14: mod_base = OTHER; note = 2'-deoxy-2'-fluorocytidine-3'-phosphate
  modified_base 15: mod_base = OTHER; note = 2'-O-methyladenosine-3'-phosphate
  modified_base 16: mod_base = OTHER; note = 2'-O-methyladenosine-3'-phosphate
  modified_base 17: mod_base = OTHER; note = 2'-O-methylcytidine-3'-phosphate
  modified_base 18: mod_base = OTHER; note = 2'-O-methyladenosine-3'-phosphate
  modified_base 19: mod_base = OTHER; note = 2'-O-methylguanosine-3'-phosphate
  modified_base 20: mod_base = OTHER; note = 2'-O-methyluridine-3'-phosphate
  modified_base 21: mod_base = OTHER; note = 2'-O-methyladenosine-3'-phosphorothioate
  modified_base 22: mod_base = OTHER; note = 2'-O-methylguanosine-3'-phosphorothioate
  modified_base 23: mod_base = OTHER; note = 2'-O-methylcytidine
  misc_feature 1: note = RNA
  misc_feature 3..4: note = RNA
  misc_feature 6: note = RNA
  misc_feature 8..11: note = RNA
  misc_feature 13..23: note = RNA
  misc_feature 2: note = DNA
  misc_feature 5: note = DNA
  misc_feature 7: note = DNA
  misc_feature 12: note = DNA
tttcgaatcaatccaacagtagc

SEQ ID NO: 1165 - DNA, 23 bp, synthetic construct
  source 1..23: mol_type = other DNA
  modified_base 1: mod_base = OTHER; note = 2'-O-methyluridine-3'-phosphate 5'-(E)-Vinylphosphonate
  modified_base 3: mod_base = OTHER; note = 2'-O-methyluridine-3'-phosphate
  modified_base 4: mod_base = OTHER; note = 2'-O-methyluridine-3'-phosphate
  modified_base 6: mod_base = OTHER; note = 2'-O-methylguanosine-3'-phosphate
  modified_base 8: mod_base = OTHER; note = 2'-O-methyladenosine-3'-phosphate
  modified_base 9: mod_base = OTHER; note = 2'-O-methyluridine-3'-phosphate
  modified_base 10: mod_base = OTHER; note = 2'-O-methylcytidine-3'-phosphate
  modified_base 11: mod_base = OTHER; note = 2'-O-methyladenosine-3'-phosphate
  modified_base 13: mod_base = OTHER; note = 2'-O-methyluridine-3'-phosphate
  modified_base 14: mod_base = OTHER; note = 2'-deoxy-2'-fluorocytidine-3'-phosphate
  modified_base 15: mod_base = OTHER; note = 2'-O-methylcytidine-3'-phosphate
  modified_base 16: mod_base = OTHER; note = 2'-O-methyladenosine-3'-phosphate
  modified_base 17: mod_base = OTHER; note = 2'-O-methyladenosine-3'-phosphate
  modified_base 18: mod_base = OTHER; note = 2'-O-methylcytidine-3'-phosphate
  modified_base 19: mod_base = OTHER; note = 2'-O-methyladenosine-3'-phosphate
  modified_base 20: mod_base = OTHER; note = 2'-O-methylguanosine-3'-phosphate
  modified_base 21: mod_base = OTHER; note = 2'-O-methyluridine-3'-phosphorothioate
  modified_base 22: mod_base = OTHER; note = 2'-O-methyladenosine-3'-phosphorothioate
  modified_base 23: mod_base = OTHER; note = 2'-O-methylguanosine
  misc_feature 1: note = RNA
  misc_feature 3..4: note = RNA
  misc_feature 6: note = RNA
  misc_feature 8..11: note = RNA
  misc_feature 13..23: note = RNA
  misc_feature 2: note = DNA
  misc_feature 5: note = DNA
  misc_feature 7: note = DNA
  misc_feature 12: note = DNA
ttttcgaatcaatccaacagtag

SEQ ID NO: 1166 - DNA, 23 bp, synthetic construct
  source 1..23: mol_type = other DNA
  modified_base 1: mod_base = OTHER; note = 2'-O-methyluridine-3'-phosphate 5'-(E)-Vinylphosphonate
  modified_base 3: mod_base = OTHER; note = 2'-O-methyluridine-3'-phosphate
  modified_base 4: mod_base = OTHER; note = 2'-O-methyluridine-3'-phosphate
  modified_base 6: mod_base = OTHER; note = 2'-O-methylcytidine-3'-phosphate
  modified_base 8: mod_base = OTHER; note = 2'-O-methyladenosine-3'-phosphate
  modified_base 9: mod_base = OTHER; note = 2'-O-methyladenosine-3'-phosphate
  modified_base 10: mod_base = OTHER; note = 2'-O-methyluridine-3'-phosphate
  modified_base 11: mod_base = OTHER; note = 2'-O-methylcytidine-3'-phosphate
  modified_base 13: mod_base = OTHER; note = 2'-O-methyladenosine-3'-phosphate
  modified_base 14: mod_base = OTHER; note = 2'-deoxy-2'-fluorouridine-3'-phosphate
  modified_base 15: mod_base = OTHER; note = 2'-O-methylcytidine-3'-phosphate
  modified_base 16: mod_base = OTHER; note = 2'-O-methylcytidine-3'-phosphate
  modified_base 17: mod_base = OTHER; note = 2'-O-methyladenosine-3'-phosphate
  modified_base 18: mod_base = OTHER; note = 2'-O-methyladenosine-3'-phosphate
  modified_base 19: mod_base = OTHER; note = 2'-O-methylcytidine-3'-phosphate
  modified_base 20: mod_base = OTHER; note = 2'-O-methyladenosine-3'-phosphate
  modified_base 21: mod_base = OTHER; note = 2'-O-methylguanosine-3'-phosphorothioate
  modified_base 22: mod_base = OTHER; note = 2'-O-methyluridine-3'-phosphorothioate
  modified_base 23: mod_base = OTHER; note = 2'-O-methyladenosine
  misc_feature 1: note = RNA
  misc_feature 3..4: note = RNA
  misc_feature 6: note = RNA
  misc_feature 8..11: note = RNA
  misc_feature 13..23: note = RNA
  misc_feature 2: note = DNA
  misc_feature 5: note = DNA
  misc_feature 7: note = DNA
  misc_feature 12: note = DNA
tatttcgaatcaatccaacagta

SEQ ID NO: 1167 - DNA, 23 bp, synthetic construct
  source 1..23: mol_type = other DNA
  modified_base 1: mod_base = OTHER; note = 2'-O-methyluridine-3'-phosphate 5'-(E)-Vinylphosphonate
  modified_base 3: mod_base = OTHER; note = 2'-O-methylguanosine-3'-phosphate
  modified_base 4: mod_base = OTHER; note = 2'-O-methyladenosine-3'-phosphate
  modified_base 6: mod_base = OTHER; note = 2'-O-methyluridine-3'-phosphate
  modified_base 8: mod_base = OTHER; note = 2'-O-methylcytidine-3'-phosphate
  modified_base 9: mod_base = OTHER; note = 2'-O-methylguanosine-3'-phosphate
  modified_base 10: mod_base = OTHER; note = 2'-O-methyladenosine-3'-phosphate
  modified_base 11: mod_base = OTHER; note = 2'-O-methyladenosine-3'-phosphate
  modified_base 13: mod_base = OTHER; note = 2'-O-methylcytidine-3'-phosphate
  modified_base 14: mod_base = OTHER; note = 2'-deoxy-2'-fluoroadenosine-3'-phosphate
  modified_base 15: mod_base = OTHER; note = 2'-O-methyladenosine-3'-phosphate
  modified_base 16: mod_base = OTHER; note = 2'-O-methyluridine-3'-phosphate
  modified_base 17: mod_base = OTHER; note = 2'-O-methylcytidine-3'-phosphate
  modified_base 18: mod_base = OTHER; note = 2'-O-methylcytidine-3'-phosphate
  modified_base 19: mod_base = OTHER; note = 2'-O-methyladenosine-3'-phosphate
  modified_base 20: mod_base = OTHER; note = 2'-O-methyladenosine-3'-phosphate
  modified_base 21: mod_base = OTHER; note = 2'-O-methylcytidine-3'-phosphorothioate
  modified_base 22: mod_base = OTHER; note = 2'-O-methyladenosine-3'-phosphorothioate
  modified_base 23: mod_base = OTHER; note = 2'-O-methylguanosine
  misc_feature 1: note = RNA
  misc_feature 3..4: note = RNA
  misc_feature 6: note = RNA
  misc_feature 8..11: note = RNA
  misc_feature 13..23: note = RNA
  misc_feature 2: note = DNA
  misc_feature 5: note = DNA
  misc_feature 7: note = DNA
  misc_feature 12: note = DNA
tagatttcgaatcaatccaacag

SEQ ID NO: 1168 - DNA, 23 bp, synthetic construct
  source 1..23: mol_type = other DNA
  modified_base 1: mod_base = OTHER; note = 2'-O-methyluridine-3'-phosphate 5'-(E)-Vinylphosphonate
  modified_base 2: mod_base = OTHER; note = 2'-deoxy-2'-fluoroadenosine-3'-phosphate
  modified_base 3: mod_base = OTHER; note = 2'-O-methylguanosine-3'-phosphate
  modified_base 4: mod_base = OTHER; note = 2'-O-methyladenosine-3'-phosphate
  modified_base 6: mod_base = OTHER; note = 2'-O-methyluridine-3'-phosphate
  modified_base 7: mod_base = OTHER; note = Thymidine-glycol nucleic acid (GNA), S-Isomer
  modified_base 8: mod_base = OTHER; note = 2'-O-methylcytidine-3'-phosphate
  modified_base 9: mod_base = OTHER; note = 2'-O-methylguanosine-3'-phosphate
  modified_base 10: mod_base = OTHER; note = 2'-O-methyladenosine-3'-phosphate
  modified_base 11: mod_base = OTHER; note = 2'-O-methyladenosine-3'-phosphate
  modified_base 12: mod_base = OTHER; note = 2'-O-methyluridine-3'-phosphate
  modified_base 13: mod_base = OTHER; note = 2'-O-methylcytidine-3'-phosphate
  modified_base 14: mod_base = OTHER; note = 2'-deoxy-2'-fluoroadenosine-3'-phosphate
  modified_base 15: mod_base = OTHER; note = 2'-O-methyladenosine-3'-phosphate
  modified_base 16: mod_base = OTHER; note = 2'-deoxy-2'-fluorouridine-3'-phosphate
  modified_base 17: mod_base = OTHER; note = 2'-O-methylcytidine-3'-phosphate
  modified_base 18: mod_base = OTHER; note = 2'-O-methylcytidine-3'-phosphate
  modified_base 19: mod_base = OTHER; note = 2'-O-methyladenosine-3'-phosphate
  modified_base 20: mod_base = OTHER; note = 2'-O-methyladenosine-3'-phosphate
  modified_base 21: mod_base = OTHER; note = 2'-O-methylcytidine-3'-phosphorothioate
  modified_base 22: mod_base = OTHER; note = 2'-O-methyladenosine-3'-phosphorothioate
  modified_base 23: mod_base = OTHER; note = 2'-O-methylguanosine
  misc_feature 1..4: note = RNA
  misc_feature 6..23: note = RNA
  misc_feature 5: note = DNA
tagatttcgaatcaatccaacag

SEQ ID NO: 1169 - DNA, 23 bp, synthetic construct
  source 1..23: mol_type = other DNA
  modified_base 1: mod_base = OTHER; note = 2'-O-methyluridine-3'-phosphate 5'-(E)-Vinylphosphonate
  modified_base 3: mod_base = OTHER; note = 2'-O-methyladenosine-3'-phosphate
  modified_base 4: mod_base = OTHER; note = 2'-O-methylguanosine-3'-phosphate
  modified_base 6: mod_base = OTHER; note = 2'-O-methyluridine-3'-phosphate
  modified_base 8: mod_base = OTHER; note = 2'-O-methyluridine-3'-phosphate
  modified_base 9: mod_base = OTHER; note = 2'-O-methylcytidine-3'-phosphate
  modified_base 10: mod_base = OTHER; note = 2'-O-methylguanosine-3'-phosphate
  modified_base 11: mod_base = OTHER; note = 2'-O-methyladenosine-3'-phosphate
  modified_base 13: mod_base = OTHER; note = 2'-O-methyluridine-3'-phosphate
  modified_base 14: mod_base = OTHER; note = 2'-deoxy-2'-fluorocytidine-3'-phosphate
  modified_base 15: mod_base = OTHER; note = 2'-O-methyladenosine-3'-phosphate
  modified_base 16: mod_base = OTHER; note = 2'-O-methyladenosine-3'-phosphate
  modified_base 17: mod_base = OTHER; note = 2'-O-methyluridine-3'-phosphate
  modified_base 18: mod_base = OTHER; note = 2'-O-methylcytidine-3'-phosphate
  modified_base 19: mod_base = OTHER; note = 2'-O-methylcytidine-3'-phosphate
  modified_base 20: mod_base = OTHER; note = 2'-O-methyladenosine-3'-phosphate
  modified_base 21: mod_base = OTHER; note = 2'-O-methyladenosine-3'-phosphorothioate
  modified_base 22: mod_base = OTHER; note = 2'-O-methylcytidine-3'-phosphorothioate
  modified_base 23: mod_base = OTHER; note = 2'-O-methyladenosine
  misc_feature 1: note = RNA
  misc_feature 3..4: note = RNA
  misc_feature 6: note = RNA
  misc_feature 8..11: note = RNA
  misc_feature 13..23: note = RNA
  misc_feature 2: note = DNA
  misc_feature 5: note = DNA
  misc_feature 7: note = DNA
  misc_feature 12: note = DNA
taagatttcgaatcaatccaaca

SEQ ID NO: 1170 - DNA, 23 bp, synthetic construct
  source 1..23: mol_type = other DNA
  modified_base 1: mod_base = OTHER; note = 2'-O-methyluridine-3'-phosphate 5'-(E)-Vinylphosphonate
  modified_base 2: mod_base = OTHER; note = 2'-deoxy-2'-fluoroguanosine-3'-phosphate
  modified_base 3: mod_base = OTHER; note = 2'-O-methylcytidine-3'-phosphate
  modified_base 4: mod_base = OTHER; note = 2'-O-methyladenosine-3'-phosphate
  modified_base 6: mod_base = OTHER; note = 2'-O-methylguanosine-3'-phosphate
  modified_base 7: mod_base = OTHER; note = Adenosine-glycol nucleic acid (GNA), S-isomer
  modified_base 8: mod_base = OTHER; note = 2'-O-methyluridine-3'-phosphate
  modified_base 9: mod_base = OTHER; note = 2'-O-methyluridine-3'-phosphate
  modified_base 10: mod_base = OTHER; note = 2'-O-methyluridine-3'-phosphate
  modified_base 11: mod_base = OTHER; note = 2'-O-methylcytidine-3'-phosphate
  modified_base 12: mod_base = OTHER; note = 2'-O-methylguanosine-3'-phosphate
  modified_base 13: mod_base = OTHER; note = 2'-O-methyladenosine-3'-phosphate
  modified_base 14: mod_base = OTHER; note = 2'-deoxy-2'-fluoroadenosine-3'-phosphate
  modified_base 15: mod_base = OTHER; note = 2'-O-methyluridine-3'-phosphate
  modified_base 16: mod_base = OTHER; note = 2'-deoxy-2'-fluorocytidine-3'-phosphate
  modified_base 17: mod_base = OTHER; note = 2'-O-methyladenosine-3'-phosphate
  modified_base 18: mod_base = OTHER; note = 2'-O-methyladenosine-3'-phosphate
  modified_base 19: mod_base = OTHER; note = 2'-O-methyluridine-3'-phosphate
  modified_base 20: mod_base = OTHER; note = 2'-O-methylcytidine-3'-phosphate
  modified_base 21: mod_base = OTHER; note = 2'-O-methylcytidine-3'-phosphorothioate
  modified_base 22: mod_base = OTHER; note = 2'-O-methyladenosine-3'-phosphorothioate
  modified_base 23: mod_base = OTHER; note = 2'-O-methyladenosine
  misc_feature 1..4: note = RNA
  misc_feature 6..23: note = RNA
  misc_feature 5: note = DNA
tgcaagatttcgaatcaatccaa

SEQ ID NO: 1171 - DNA, 23 bp, synthetic construct
  source 1..23: mol_type = other DNA
  modified_base 1: mod_base = OTHER; note = 2'-O-methyluridine-3'-phosphate 5'-(E)-Vinylphosphonate
  modified_base 3: mod_base = OTHER; note = 2'-O-methylcytidine-3'-phosphate
  modified_base 4: mod_base = OTHER; note = 2'-O-methyladenosine-3'-phosphate
  modified_base 6: mod_base = OTHER; note = 2'-O-methylguanosine-3'-phosphate
  modified_base 8: mod_base = OTHER; note = 2'-O-methyluridine-3'-phosphate
  modified_base 9: mod_base = OTHER; note = 2'-O-methyluridine-3'-phosphate
  modified_base 10: mod_base = OTHER; note = 2'-O-methyluridine-3'-phosphate
  modified_base 11: mod_base = OTHER; note = 2'-O-methylcytidine-3'-phosphate
  modified_base 13: mod_base = OTHER; note = 2'-O-methyladenosine-3'-phosphate
  modified_base 14: mod_base = OTHER; note = 2'-deoxy-2'-fluoroadenosine-3'-phosphate
  modified_base 15: mod_base = OTHER; note = 2'-O-methyluridine-3'-phosphate
  modified_base 16: mod_base = OTHER; note = 2'-O-methylcytidine-3'-phosphate
  modified_base 17: mod_base = OTHER; note = 2'-O-methyladenosine-3'-phosphate
  modified_base 18: mod_base = OTHER; note = 2'-O-methyladenosine-3'-phosphate
  modified_base 19: mod_base = OTHER; note = 2'-O-methyluridine-3'-phosphate
  modified_base 20: mod_base = OTHER; note = 2'-O-methylcytidine-3'-phosphate
  modified_base 21: mod_base = OTHER; note = 2'-O-methylcytidine-3'-phosphorothioate
  modified_base 22: mod_base = OTHER; note = 2'-O-methyladenosine-3'-phosphorothioate
  modified_base 23: mod_base = OTHER; note = 2'-O-methyladenosine
  misc_feature 1: note = RNA
  misc_feature 3..4: note = RNA
  misc_feature 6: note = RNA
  misc_feature 8..11: note = RNA
  misc_feature 13..23: note = RNA
  misc_feature 2: note = DNA
  misc_feature 5: note = DNA
  misc_feature 7: note = DNA
  misc_feature 12: note = DNA
tgcaagatttcgaatcaatccaa

SEQ ID NO: 1172 - DNA, 23 bp, synthetic construct
  source 1..23: mol_type = other DNA
  modified_base 1: mod_base = OTHER; note = 2'-O-methyluridine-3'-phosphate 5'-(E)-Vinylphosphonate
  modified_base 2: mod_base = OTHER; note = 2'-deoxy-2'-fluoroadenosine-3'-phosphate
  modified_base 3: mod_base = OTHER; note = 2'-O-methylguanosine-3'-phosphate
  modified_base 4: mod_base = OTHER; note = 2'-O-methylguanosine-3'-phosphate
  modified_base 6: mod_base = OTHER; note = 2'-O-methylcytidine-3'-phosphate
  modified_base 7: mod_base = OTHER; note = Adenosine-glycol nucleic acid (GNA), S-isomer
  modified_base 8: mod_base = OTHER; note = 2'-O-methyladenosine-3'-phosphate
  modified_base 9: mod_base = OTHER; note = 2'-O-methylguanosine-3'-phosphate
  modified_base 10: mod_base = OTHER; note = 2'-O-methyladenosine-3'-phosphate
  modified_base 11: mod_base = OTHER; note = 2'-O-methyluridine-3'-phosphate
  modified_base 12: mod_base = OTHER; note = 2'-O-methyluridine-3'-phosphate
  modified_base 13: mod_base = OTHER; note = 2'-O-methyluridine-3'-phosphate
  modified_base 14: mod_base = OTHER; note = 2'-deoxy-2'-fluorocytidine-3'-phosphate
  modified_base 15: mod_base = OTHER; note = 2'-O-methylguanosine-3'-phosphate
  modified_base 16: mod_base = OTHER; note = 2'-deoxy-2'-fluoroadenosine-3'-phosphate
  modified_base 17: mod_base = OTHER; note = 2'-O-methyladenosine-3'-phosphate
  modified_base 18: mod_base = OTHER; note = 2'-O-methyluridine-3'-phosphate
  modified_base 19: mod_base = OTHER; note = 2'-O-methylcytidine-3'-phosphate
  modified_base 20: mod_base = OTHER; note = 2'-O-methyladenosine-3'-phosphate
  modified_base 21: mod_base = OTHER; note = 2'-O-methyladenosine-3'-phosphorothioate
  modified_base 22: mod_base = OTHER; note = 2'-O-methyluridine-3'-phosphorothioate
  modified_base 23: mod_base = OTHER; note = 2'-O-methylcytidine
  misc_feature 1..4: note = RNA
  misc_feature 6..23: note = RNA
  misc_feature 5: note = DNA
tagggcaagatttcgaatcaatc

SEQ ID NO: 1173 - DNA, 23 bp, synthetic construct
  source 1..23: mol_type = other DNA
  modified_base 1: mod_base = OTHER; note = 2'-O-methyluridine-3'-phosphate 5'-(E)-Vinylphosphonate
  modified_base 2: mod_base = OTHER; note = 2'-deoxy-2'-fluoroadenosine-3'-phosphate
  modified_base 3: mod_base = OTHER; note = 2'-O-methyladenosine-3'-phosphate
  modified_base 4: mod_base = OTHER; note = 2'-O-methylcytidine-3'-phosphate
  modified_base 6: mod_base = OTHER; note = 2'-O-methylguanosine-3'-phosphate
  modified_base 7: mod_base = OTHER; note = Adenosine-glycol nucleic acid (GNA), S-isomer
  modified_base 8: mod_base = OTHER; note = 2'-O-methyladenosine-3'-phosphate
  modified_base 9: mod_base = OTHER; note = 2'-O-methylcytidine-3'-phosphate
  modified_base 10: mod_base = OTHER; note = 2'-O-methyluridine-3'-phosphate
  modified_base 11: mod_base = OTHER; note = 2'-O-methyladenosine-3'-phosphate
  modified_base 12: mod_base = OTHER; note = 2'-O-methylguanosine-3'-phosphate
  modified_base 13: mod_base = OTHER; note = 2'-O-methyluridine-3'-phosphate
  modified_base 14: mod_base = OTHER; note = 2'-deoxy-2'-fluorocytidine-3'-phosphate
  modified_base 15: mod_base = OTHER; note = 2'-O-methylguanosine-3'-phosphate
  modified_base 16: mod_base = OTHER; note = 2'-deoxy-2'-fluorouridine-3'-phosphate
  modified_base 17: mod_base = OTHER; note = 2'-O-methylguanosine-3'-phosphate
  modified_base 18: mod_base = OTHER; note = 2'-O-methylguanosine-3'-phosphate
  modified_base 19: mod_base = OTHER; note = 2'-O-methyladenosine-3'-phosphate
  modified_base 20: mod_base = OTHER; note = 2'-O-methyladenosine-3'-phosphate
  modified_base 21: mod_base = OTHER; note = 2'-O-methyluridine-3'-phosphorothioate
  modified_base 22: mod_base = OTHER; note = 2'-O-methylguanosine-3'-phosphorothioate
  modified_base 23: mod_base = OTHER; note = 2'-O-methylguanosine
  misc_feature 1..4: note = RNA
  misc_feature 6..23: note = RNA
  misc_feature 5: note = DNA
taactgaactagtcgtggaatgg

SEQ ID NO: 1174 - DNA, 23 bp, synthetic construct
  source 1..23: mol_type = other DNA
  modified_base 1: mod_base = OTHER; note = 2'-O-methyluridine-3'-phosphate 5'-(E)-Vinylphosphonate
  modified_base 3: mod_base = OTHER; note = 2'-O-methylguanosine-3'-phosphate
  modified_base 4: mod_base = OTHER; note = 2'-O-methylcytidine-3'-phosphate
  modified_base 6: mod_base = OTHER; note = 2'-O-methyladenosine-3'-phosphate
  modified_base 8: mod_base = OTHER; note = 2'-O-methyluridine-3'-phosphate
  modified_base 9: mod_base = OTHER; note = 2'-O-methylguanosine-3'-phosphate
  modified_base 10: mod_base = OTHER; note = 2'-O-methyladenosine-3'-phosphate
  modified_base 11: mod_base = OTHER; note = 2'-O-methyladenosine-3'-phosphate
  modified_base 13: mod_base = OTHER; note = 2'-O-methyluridine-3'-phosphate
  modified_base 14: mod_base = OTHER; note = 2'-deoxy-2'-fluoroadenosine-3'-phosphate
  modified_base 15: mod_base = OTHER; note = 2'-O-methylguanosine-3'-phosphate
  modified_base 16: mod_base = OTHER; note = 2'-O-methyluridine-3'-phosphate
  modified_base 17: mod_base = OTHER; note = 2'-O-methylcytidine-3'-phosphate
  modified_base 18: mod_base = OTHER; note = 2'-O-methylguanosine-3'-phosphate
  modified_base 19: mod_base = OTHER; note = 2'-O-methyluridine-3'-phosphate
  modified_base 20: mod_base = OTHER; note = 2'-O-methylguanosine-3'-phosphate
  modified_base 21: mod_base = OTHER; note = 2'-O-methylguanosine-3'-phosphorothioate
  modified_base 22: mod_base = OTHER; note = 2'-O-methyladenosine-3'-phosphorothioate
  modified_base 23: mod_base = OTHER; note = 2'-O-methyladenosine
  misc_feature 1: note = RNA
  misc_feature 3..4: note = RNA
  misc_feature 6: note = RNA
  misc_feature 8..11: note = RNA
  misc_feature 13..23: note = RNA
  misc_feature 2: note = DNA
  misc_feature 5: note = DNA
  misc_feature 7: note = DNA
  misc_feature 12: note = DNA
tagcaactgaactagtcgtggaa

SEQ ID NO: 1175 - DNA, 23 bp, synthetic construct
  source 1..23: mol_type = other DNA
  modified_base 1: mod_base = OTHER; note = 2'-O-methyluridine-3'-phosphate 5'-(E)-Vinylphosphonate
  modified_base 3: mod_base = OTHER; note = 2'-O-methylguanosine-3'-phosphate
  modified_base 4: mod_base = OTHER; note = 2'-O-methylcytidine-3'-phosphate
  modified_base 6: mod_base = OTHER; note = 2'-O-methylcytidine-3'-phosphate
  modified_base 8: mod_base = OTHER; note = 2'-O-methyladenosine-3'-phosphate
  modified_base 9: mod_base = OTHER; note = 2'-O-methyladenosine-3'-phosphate
  modified_base 10: mod_base = OTHER; note = 2'-O-methylcytidine-3'-phosphate
  modified_base 11: mod_base = OTHER; note = 2'-O-methyladenosine-3'-phosphate
  modified_base 13: mod_base = OTHER; note = 2'-O-methylguanosine-3'-phosphate
  modified_base 14: mod_base = OTHER; note = 2'-deoxy-2'-fluorocytidine-3'-phosphate
  modified_base 15: mod_base = OTHER; note = 2'-O-methyladenosine-3'-phosphate
  modified_base 16: mod_base = OTHER; note = 2'-O-methyladenosine-3'-phosphate
  modified_base 17: mod_base = OTHER; note = 2'-O-methylcytidine-3'-phosphate
  modified_base 18: mod_base = OTHER; note = 2'-O-methyluridine-3'-phosphate
  modified_base 19: mod_base = OTHER; note = 2'-O-methylguanosine-3'-phosphate
  modified_base 20: mod_base = OTHER; note = 2'-O-methyladenosine-3'-phosphate
  modified_base 21: mod_base = OTHER; note = 2'-O-methyladenosine-3'-phosphorothioate
  modified_base 22: mod_base = OTHER; note = 2'-O-methylcytidine-3'-phosphorothioate
  modified_base 23: mod_base = OTHER; note = 2'-O-methyluridine
  misc_feature 1: note = RNA
  misc_feature 3..4: note = RNA
  misc_feature 6: note = RNA
  misc_feature 8..11: note = RNA
  misc_feature 13..23: note = RNA
  misc_feature 2: note = DNA
  misc_feature 5: note = DNA
  misc_feature 7: note = DNA
  misc_feature 12: note = DNA
ttgcacgaacaagcaactgaact

SEQ ID NO: 1176 - DNA, 23 bp, synthetic construct
  source 1..23: mol_type = other DNA
  modified_base 1: mod_base = OTHER; note = 2'-O-methyluridine-3'-phosphate 5'-(E)-Vinylphosphonate
  modified_base 3: mod_base = OTHER; note = 2'-O-methyladenosine-3'-phosphate
  modified_base 4: mod_base = OTHER; note = 2'-O-methylcytidine-3'-phosphate
  modified_base 6: mod_base = OTHER; note = 2'-O-methyladenosine-3'-phosphate
  modified_base 8: mod_base = OTHER; note = 2'-O-methyluridine-3'-phosphate
  modified_base 9: mod_base = OTHER; note = 2'-O-methyluridine-3'-phosphate
  modified_base 10: mod_base = OTHER; note = 2'-O-methylguanosine-3'-phosphate
  modified_base 11: mod_base = OTHER; note = 2'-O-methylcytidine-3'-phosphate
  modified_base 13: mod_base = OTHER; note = 2'-O-methylguanosine-3'-phosphate
  modified_base 14: mod_base = OTHER; note = 2'-deoxy-2'-fluorocytidine-3'-phosphate
  modified_base 15: mod_base = OTHER; note = 2'-O-methyluridine-3'-phosphate
  modified_base 16: mod_base = OTHER; note = 2'-O-methylguanosine-3'-phosphate
  modified_base 17: mod_base = OTHER; note = 2'-O-methyluridine-3'-phosphate
  modified_base 18: mod_base = OTHER; note = 2'-O-methylguanosine-3'-phosphate
  modified_base 19: mod_base = OTHER; note = 2'-O-methyluridine-3'-phosphate
  modified_base 20: mod_base = OTHER; note = 2'-O-methylcytidine-3'-phosphate
  modified_base 21: mod_base = OTHER; note = 2'-O-methylcytidine-3'-phosphorothioate
  modified_base 22: mod_base = OTHER; note = 2'-O-methylcytidine-3'-phosphorothioate
  modified_base 23: mod_base = OTHER; note = 2'-O-methyladenosine
  misc_feature 1: note = RNA
  misc_feature 3..4: note = RNA
  misc_feature 6: note = RNA
  misc_feature 8..11: note = RNA
  misc_feature 13..23: note = RNA
  misc_feature 2: note = DNA
  misc_feature 5: note = DNA
  misc_feature 7: note = DNA
  misc_feature 12: note = DNA
tcacaaattgctgctgtgtccca

SEQ ID NO: 1177 - DNA, 23 bp, synthetic construct
  source 1..23: mol_type = other DNA
  modified_base 1: mod_base = OTHER; note = 2'-O-methyluridine-3'-phosphate 5'-(E)-Vinylphosphonate
  modified_base 2: mod_base = OTHER; note = 2'-deoxy-2'-fluorouridine-3'-phosphate
  modified_base 3: mod_base = OTHER; note = 2'-O-methylguanosine-3'-phosphate
  modified_base 4: mod_base = OTHER; note = 2'-O-methyladenosine-3'-phosphate
  modified_base 6: mod_base = OTHER; note = 2'-O-methylcytidine-3'-phosphate
  modified_base 7: mod_base = OTHER; note = Adenosine-glycol nucleic acid (GNA), S-isomer
  modified_base 8: mod_base = OTHER; note = 2'-O-methyluridine-3'-phosphate
  modified_base 9: mod_base = OTHER; note = 2'-O-methylcytidine-3'-phosphate
  modified_base 10: mod_base = OTHER; note = 2'-O-methylcytidine-3'-phosphate
  modified_base 11: mod_base = OTHER; note = 2'-O-methylcytidine-3'-phosphate
  modified_base 12: mod_base = OTHER; note = 2'-O-methylguanosine-3'-phosphate
  modified_base 13: mod_base = OTHER; note = 2'-O-methyladenosine-3'-phosphate
  modified_base 14: mod_base = OTHER; note = 2'-deoxy-2'-fluoroguanosine-3'-phosphate
  modified_base 15: mod_base = OTHER; note = 2'-O-methylcytidine-3'-phosphate
  modified_base 16: mod_base = OTHER; note = 2'-deoxy-2'-fluorouridine-3'-phosphate
  modified_base 17: mod_base = OTHER; note = 2'-O-methyladenosine-3'-phosphate
  modified_base 18: mod_base = OTHER; note = 2'-O-methylguanosine-3'-phosphate
  modified_base 19: mod_base = OTHER; note = 2'-O-methylguanosine-3'-phosphate
  modified_base 20: mod_base = OTHER; note = 2'-O-methyladenosine-3'-phosphate
  modified_base 21: mod_base = OTHER; note = 2'-O-methyluridine-3'-phosphorothioate
  modified_base 22: mod_base = OTHER; note = 2'-O-methylguanosine-3'-phosphorothioate
  modified_base 23: mod_base = OTHER; note = 2'-O-methyluridine
  misc_feature 1..4: note = RNA
  misc_feature 6..23: note = RNA
  misc_feature 5: note = DNA
ttgaacatcccgagctaggatgt

SEQ ID NO: 1178 - DNA, 23 bp, synthetic construct
  source 1..23: mol_type = other DNA
  modified_base 1: mod_base = OTHER; note = 2'-O-methyluridine-3'-phosphate 5'-(E)-Vinylphosphonate
  modified_base 2: mod_base = OTHER; note = 2'-deoxy-2'-fluoroguanosine-3'-phosphate
  modified_base 3: mod_base = OTHER; note = 2'-O-methylguanosine-3'-phosphate
  modified_base 4: mod_base = OTHER; note = 2'-O-methyluridine-3'-phosphate
  modified_base 6: mod_base = OTHER; note = 2'-O-methylguanosine-3'-phosphate
  modified_base 7: mod_base = OTHER; note = Thymidine-glycol nucleic acid (GNA), S-Isomer
  modified_base 8: mod_base = OTHER; note = 2'-O-methylguanosine-3'-phosphate
  modified_base 9: mod_base = OTHER; note = 2'-O-methyladenosine-3'-phosphate
  modified_base 10: mod_base = OTHER; note = 2'-O-methyladenosine-3'-phosphate
  modified_base 11: mod_base = OTHER; note = 2'-O-methylcytidine-3'-phosphate
  modified_base 12: mod_base = OTHER; note = 2'-O-methyladenosine-3'-phosphate
  modified_base 13: mod_base = OTHER; note = 2'-O-methyluridine-3'-phosphate
  modified_base 14: mod_base = OTHER; note = 2'-deoxy-2'-fluorocytidine-3'-phosphate
  modified_base 15: mod_base = OTHER; note = 2'-O-methylcytidine-3'-phosphate
  modified_base 16: mod_base = OTHER; note = 2'-deoxy-2'-fluorocytidine-3'-phosphate
  modified_base 17: mod_base = OTHER; note = 2'-O-methylguanosine-3'-phosphate
  modified_base 18: mod_base = OTHER; note = 2'-O-methyladenosine-3'-phosphate
  modified_base 19: mod_base = OTHER; note = 2'-O-methylguanosine-3'-phosphate
  modified_base 20: mod_base = OTHER; note = 2'-O-methylcytidine-3'-phosphate
  modified_base 21: mod_base = OTHER; note = 2'-O-methyluridine-3'-phosphorothioate
  modified_base 22: mod_base = OTHER; note = 2'-O-methyladenosine-3'-phosphorothioate
  modified_base 23: mod_base = OTHER; note = 2'-O-methylguanosine
  misc_feature 1..4: note = RNA
  misc_feature 6..23: note = RNA
  misc_feature 5: note = DNA
tggttgtgaacatcccgagctag

SEQ ID NO: 1179 - DNA, 23 bp, synthetic construct
  source 1..23: mol_type = other DNA
  modified_base 1: mod_base = OTHER; note = 2'-O-methyluridine-3'-phosphate 5'-(E)-Vinylphosphonate
  modified_base 3: mod_base = OTHER; note = 2'-O-methylcytidine-3'-phosphate
  modified_base 4: mod_base = OTHER; note = 2'-O-methyladenosine-3'-phosphate
  modified_base 6: mod_base = OTHER; note = 2'-O-methyluridine-3'-phosphate
  modified_base 8: mod_base = OTHER; note = 2'-O-methylcytidine-3'-phosphate
  modified_base 9: mod_base = OTHER; note = 2'-O-methylguanosine-3'-phosphate
  modified_base 10: mod_base = OTHER; note = 2'-O-methylguanosine-3'-phosphate
  modified_base 11: mod_base = OTHER; note = 2'-O-methyluridine-3'-phosphate
  modified_base 13: mod_base = OTHER; note = 2'-O-methylguanosine-3'-phosphate
  modified_base 14: mod_base = OTHER; note = 2'-deoxy-2'-fluorouridine-3'-phosphate
  modified_base 15: mod_base = OTHER; note = 2'-O-methylguanosine-3'-phosphate
  modified_base 16: mod_base = OTHER; note = 2'-O-methyladenosine-3'-phosphate
  modified_base 17: mod_base = OTHER; note = 2'-O-methyladenosine-3'-phosphate
  modified_base 18: mod_base = OTHER; note = 2'-O-methylcytidine-3'-phosphate
  modified_base 19: mod_base = OTHER; note = 2'-O-methyladenosine-3'-phosphate
  modified_base 20: mod_base = OTHER; note = 2'-O-methyluridine-3'-phosphate
  modified_base 21: mod_base = OTHER; note = 2'-O-methylcytidine-3'-phosphorothioate
  modified_base 22: mod_base = OTHER; note = 2'-O-methylcytidine-3'-phosphorothioate
  modified_base 23: mod_base = OTHER; note = 2'-O-methylcytidine
  misc_feature 1: note = RNA
  misc_feature 3..4: note = RNA
  misc_feature 6: note = RNA
  misc_feature 8..11: note = RNA
  misc_feature 13..23: note = RNA
  misc_feature 2: note = DNA
  misc_feature 5: note = DNA
  misc_feature 7: note = DNA
  misc_feature 12: note = DNA
tacaattcggttgtgaacatccc

SEQ ID NO: 1180 - DNA, 23 bp, synthetic construct
  source 1..23: mol_type = other DNA
  modified_base 1: mod_base = OTHER; note = 2'-O-methyluridine-3'-phosphate 5'-(E)-Vinylphosphonate
  modified_base 2: mod_base = OTHER; note = 2'-deoxy-2'-fluorouridine-3'-phosphate
  modified_base 3: mod_base = OTHER; note = 2'-O-methylguanosine-3'-phosphate
  modified_base 4: mod_base = OTHER; note = 2'-O-methylguanosine-3'-phosphate
  modified_base 6: mod_base = OTHER; note = 2'-O-methyladenosine-3'-phosphate
  modified_base 7: mod_base = OTHER; note = Thymidine-glycol nucleic acid (GNA), S-Isomer
  modified_base 8: mod_base = OTHER; note = 2'-O-methyluridine-3'-phosphate
  modified_base 9: mod_base = OTHER; note = 2'-O-methyluridine-3'-phosphate
  modified_base 10: mod_base = OTHER; note = 2'-O-methyladenosine-3'-phosphate
  modified_base 11: mod_base = OTHER; note = 2'-O-methylguanosine-3'-phosphate
  modified_base 12: mod_base = OTHER; note = 2'-O-methyluridine-3'-phosphate
  modified_base 13: mod_base = OTHER; note = 2'-O-methylcytidine-3'-phosphate
  modified_base 14: mod_base = OTHER; note = 2'-deoxy-2'-fluorocytidine-3'-phosphate
  modified_base 15: mod_base = OTHER; note = 2'-O-methyluridine-3'-phosphate
  modified_base 16: mod_base = OTHER; note = 2'-deoxy-2'-fluorocytidine-3'-phosphate
  modified_base 17: mod_base = OTHER; note = 2'-O-methyluridine-3'-phosphate
  modified_base 18: mod_base = OTHER; note = 2'-O-methylguanosine-3'-phosphate
  modified_base 19: mod_base = OTHER; note = 2'-O-methyladenosine-3'-phosphate
  modified_base 20: mod_base = OTHER; note = 2'-O-methyluridine-3'-phosphate
  modified_base 21: mod_base = OTHER; note = 2'-O-methyladenosine-3'-phosphorothioate
  modified_base 22: mod_base = OTHER; note = 2'-O-methyladenosine-3'-phosphorothioate
  modified_base 23: mod_base = OTHER; note = 2'-O-methylcytidine
  misc_feature 1..4: note = RNA
  misc_feature 6..23: note = RNA
  misc_feature 5: note = DNA
ttggtatttagtcctctgataac

SEQ ID NO: 1181 - DNA, 23 bp, synthetic construct
  source 1..23: mol_type = other DNA
  modified_base 1: mod_base = OTHER; note = 2'-O-methyluridine-3'-phosphate 5'-(E)-Vinylphosphonate
  modified_base 2: mod_base = OTHER; note = 2'-deoxy-2'-fluoroadenosine-3'-phosphate
  modified_base 3: mod_base = OTHER; note = 2'-O-methyluridine-3'-phosphate
  modified_base 4: mod_base = OTHER; note = 2'-O-methylguanosine-3'-phosphate
  modified_base 6: mod_base = OTHER; note = 2'-O-methyluridine-3'-phosphate
  modified_base 7: mod_base = OTHER; note = Adenosine-glycol nucleic acid (GNA), S-isomer
  modified_base 8: mod_base = OTHER; note = 2'-O-methyluridine-3'-phosphate
  modified_base 9: mod_base = OTHER; note = 2'-O-methyluridine-3'-phosphate
  modified_base 10: mod_base = OTHER; note = 2'-O-methyluridine-3'-phosphate
  modified_base 11: mod_base = OTHER; note = 2'-O-methyladenosine-3'-phosphate
  modified_base 12: mod_base = OTHER; note = 2'-O-methylguanosine-3'-phosphate
  modified_base 13: mod_base = OTHER; note = 2'-O-methyluridine-3'-phosphate
  modified_base 14: mod_base = OTHER; note = 2'-deoxy-2'-fluorocytidine-3'-phosphate
  modified_base 15: mod_base = OTHER; note = 2'-O-methylcytidine-3'-phosphate
  modified_base 16: mod_base = OTHER; note = 2'-deoxy-2'-fluorouridine-3'-phosphate
  modified_base 17: mod_base = OTHER; note = 2'-O-methylcytidine-3'-phosphate
  modified_base 18: mod_base = OTHER; note = 2'-O-methyluridine-3'-phosphate
  modified_base 19: mod_base = OTHER; note = 2'-O-methylguanosine-3'-phosphate
  modified_base 20: mod_base = OTHER; note = 2'-O-methyladenosine-3'-phosphate
  modified_base 21: mod_base = OTHER; note = 2'-O-methyluridine-3'-phosphorothioate
  modified_base 22: mod_base = OTHER; note = 2'-O-methyladenosine-3'-phosphorothioate
  modified_base 23: mod_base = OTHER; note = 2'-O-methyladenosine
  misc_feature 1..4: note = RNA
  misc_feature 6..23: note = RNA
  misc_feature 5: note = DNA
tatggtatttagtcctctgataa

SEQ ID NO: 1182 - DNA, 23 bp, synthetic construct
  source 1..23: mol_type = other DNA
  modified_base 1: mod_base = OTHER; note = 2'-O-methyluridine-3'-phosphate 5'-(E)-Vinylphosphonate
  modified_base 2: mod_base = OTHER; note = 2'-deoxy-2'-fluoroadenosine-3'-phosphate
  modified_base 3: mod_base = OTHER; note = 2'-O-methyladenosine-3'-phosphate
  modified_base 4: mod_base = OTHER; note = 2'-O-methyluridine-3'-phosphate
  modified_base 6: mod_base = OTHER; note = 2'-O-methylguanosine-3'-phosphate
  modified_base 7: mod_base = OTHER; note = Thymidine-glycol nucleic acid (GNA), S-Isomer
  modified_base 8: mod_base = OTHER; note = 2'-O-methyladenosine-3'-phosphate
  modified_base 9: mod_base = OTHER; note = 2'-O-methyluridine-3'-phosphate
  modified_base 10: mod_base = OTHER; note = 2'-O-methyluridine-3'-phosphate
  modified_base 11: mod_base = OTHER; note = 2'-O-methyluridine-3'-phosphate
  modified_base 12: mod_base = OTHER; note = 2'-O-methyladenosine-3'-phosphate
  modified_base 13: mod_base = OTHER; note = 2'-O-methylguanosine-3'-phosphate
  modified_base 14: mod_base = OTHER; note = 2'-deoxy-2'-fluorouridine-3'-phosphate
  modified_base 15: mod_base = OTHER; note = 2'-O-methylcytidine-3'-phosphate
  modified_base 16: mod_base = OTHER; note = 2'-deoxy-2'-fluorocytidine-3'-phosphate
  modified_base 17: mod_base = OTHER; note = 2'-O-methyluridine-3'-phosphate
  modified_base 18: mod_base = OTHER; note = 2'-O-methylcytidine-3'-phosphate
  modified_base 19: mod_base = OTHER; note = 2'-O-methyluridine-3'-phosphate
  modified_base 20: mod_base = OTHER; note = 2'-O-methylguanosine-3'-phosphate
  modified_base 21: mod_base = OTHER; note = 2'-O-methyladenosine-3'-phosphorothioate
  modified_base 22: mod_base = OTHER; note = 2'-O-methyluridine-3'-phosphorothioate
  modified_base 23: mod_base = OTHER; note = 2'-O-methyladenosine
  misc_feature 1..4: note = RNA
  misc_feature 6..23: note = RNA
  misc_feature 5: note = DNA
taatggtatttagtcctctgata

SEQ ID NO: 1183 - DNA, 23 bp, synthetic construct
  source 1..23: mol_type = other DNA
  modified_base 1: mod_base = OTHER; note = 2'-O-methyluridine-3'-phosphate 5'-(E)-Vinylphosphonate
  modified_base 2: mod_base = OTHER; note = 2'-deoxy-2'-fluorouridine-3'-phosphate
  modified_base 3: mod_base = OTHER; note = 2'-O-methylguanosine-3'-phosphate
  modified_base 4: mod_base = OTHER; note = 2'-O-methylguanosine-3'-phosphate
  modified_base 6: mod_base = OTHER; note = 2'-O-methyladenosine-3'-phosphate
  modified_base 7: mod_base = OTHER; note = Thymidine-glycol nucleic acid (GNA), S-Isomer
  modified_base 8: mod_base = OTHER; note = 2'-O-methylguanosine-3'-phosphate
  modified_base 9: mod_base = OTHER; note = 2'-O-methylguanosine-3'-phosphate
  modified_base 10: mod_base = OTHER; note = 2'-O-methyluridine-3'-phosphate
  modified_base 11: mod_base = OTHER; note = 2'-O-methyladenosine-3'-phosphate
  modified_base 12: mod_base = OTHER; note = 2'-O-methyluridine-3'-phosphate
  modified_base 13: mod_base = OTHER; note = 2'-O-methyluridine-3'-phosphate
  modified_base 14: mod_base = OTHER; note = 2'-deoxy-2'-fluorouridine-3'-phosphate
  modified_base 15: mod_base = OTHER; note = 2'-O-methyladenosine-3'-phosphate
  modified_base 16: mod_base = OTHER; note = 2'-deoxy-2'-fluoroguanosine-3'-phosphate
  modified_base 17: mod_base = OTHER; note = 2'-O-methyluridine-3'-phosphate
  modified_base 18: mod_base = OTHER; note = 2'-O-methylcytidine-3'-phosphate
  modified_base 19: mod_base = OTHER; note = 2'-O-methylcytidine-3'-phosphate
  modified_base 20: mod_base = OTHER; note = 2'-O-methyluridine-3'-phosphate
  modified_base 21: mod_base = OTHER; note = 2'-O-methylcytidine-3'-phosphorothioate
  modified_base 22: mod_base = OTHER; note = 2'-O-methyluridine-3'-phosphorothioate
  modified_base 23: mod_base = OTHER; note = 2'-O-methylguanosine
  misc_feature 1..4: note = RNA
  misc_feature 6..23: note = RNA
  misc_feature 5: note = DNA
ttggaatggtatttagtcctctg

SEQ ID NO: 1184 - DNA, 23 bp, synthetic construct
  source 1..23: mol_type = other DNA
  modified_base 1: mod_base = OTHER; note = 2'-O-methyluridine-3'-phosphate 5'-(E)-Vinylphosphonate
  modified_base 3: mod_base = OTHER; note = 2'-O-methylguanosine-3'-phosphate
  modified_base 4: mod_base = OTHER; note = 2'-O-methylguanosine-3'-phosphate
  modified_base 6: mod_base = OTHER; note = 2'-O-methyladenosine-3'-phosphate
  modified_base 8: mod_base = OTHER; note = 2'-O-methylguanosine-3'-phosphate
  modified_base 9: mod_base = OTHER; note = 2'-O-methylguanosine-3'-phosphate
  modified_base 10: mod_base = OTHER; note = 2'-O-methyluridine-3'-phosphate
  modified_base 11: mod_base = OTHER; note = 2'-O-methyladenosine-3'-phosphate
  modified_base 13: mod_base = OTHER; note = 2'-O-methyluridine-3'-phosphate
  modified_base 14: mod_base = OTHER; note = 2'-deoxy-2'-fluorouridine-3'-phosphate
  modified_base 15: mod_base = OTHER; note = 2'-O-methyladenosine-3'-phosphate
  modified_base 16: mod_base = OTHER; note = 2'-O-methylguanosine-3'-phosphate
  modified_base 17: mod_base = OTHER; note = 2'-O-methyluridine-3'-phosphate
  modified_base 18: mod_base = OTHER; note = 2'-O-methylcytidine-3'-phosphate
  modified_base 19: mod_base = OTHER; note = 2'-O-methylcytidine-3'-phosphate
  modified_base 20: mod_base = OTHER; note = 2'-O-methyluridine-3'-phosphate
  modified_base 21: mod_base = OTHER; note = 2'-O-methylcytidine-3'-phosphorothioate
  modified_base 22: mod_base = OTHER; note = 2'-O-methyluridine-3'-phosphorothioate
  modified_base 23: mod_base = OTHER; note = 2'-O-methylguanosine
  misc_feature 1: note = RNA
  misc_feature 3..4: note = RNA
  misc_feature 6: note = RNA
  misc_feature 8..11: note = RNA
  misc_feature 13..23: note = RNA
  misc_feature 2: note = DNA
  misc_feature 5: note = DNA
  misc_feature 7: note = DNA
  misc_feature 12: note = DNA
ttggaatggtatttagtcctctg

SEQ ID NO: 1185 - DNA, 23 bp, synthetic construct
  source 1..23: mol_type = other DNA
  modified_base 1: mod_base = OTHER; note = 2'-O-methyluridine-3'-phosphate 5'-(E)-Vinylphosphonate
  modified_base 3: mod_base = OTHER; note = 2'-O-methyladenosine-3'-phosphate
  modified_base 4: mod_base = OTHER; note = 2'-O-methyluridine-3'-phosphate
  modified_base 6: mod_base = OTHER; note = 2'-O-methylguanosine-3'-phosphate
  modified_base 8: mod_base = OTHER; note = 2'-O-methyladenosine-3'-phosphate
  modified_base 9: mod_base = OTHER; note = 2'-O-methyluridine-3'-phosphate
  modified_base 10: mod_base = OTHER; note = 2'-O-methylguanosine-3'-phosphate
  modified_base 11: mod_base = OTHER; note = 2'-O-methylguanosine-3'-phosphate
  modified_base 13: mod_base = OTHER; note = 2'-O-methyladenosine-3'-phosphate
  modified_base 14: mod_base = OTHER; note = 2'-deoxy-2'-fluorouridine-3'-phosphate
  modified_base 15: mod_base = OTHER; note = 2'-O-methyluridine-3'-phosphate
  modified_base 16: mod_base = OTHER; note = 2'-O-methyluridine-3'-phosphate
  modified_base 17: mod_base = OTHER; note = 2'-O-methyladenosine-3'-phosphate
  modified_base 18: mod_base = OTHER; note = 2'-O-methylguanosine-3'-phosphate
  modified_base 19: mod_base = OTHER; note = 2'-O-methyluridine-3'-phosphate
  modified_base 20: mod_base = OTHER; note = 2'-O-methylcytidine-3'-phosphate
  modified_base 21: mod_base = OTHER; note = 2'-O-methylcytidine-3'-phosphorothioate
  modified_base 22: mod_base = OTHER; note = 2'-O-methyluridine-3'-phosphorothioate
  modified_base 23: mod_base = OTHER; note = 2'-O-methylcytidine
  misc_feature 1: note = RNA
  misc_feature 3..4: note = RNA
  misc_feature 6: note = RNA
  misc_feature 8..11: note = RNA
  misc_feature 13..23: note = RNA
  misc_feature 2: note = DNA
  misc_feature 5: note = DNA
  misc_feature 7: note = DNA
  misc_feature 12: note = DNA
taatggaatggtatttagtcctc

SEQ ID NO: 1186 - DNA, 23 bp, synthetic construct
  source 1..23: mol_type = other DNA
  modified_base 1: mod_base = OTHER; note = 2'-O-methyluridine-3'-phosphate 5'-(E)-Vinylphosphonate
  modified_base 3: mod_base = OTHER; note = 2'-O-methylcytidine-3'-phosphate
  modified_base 4: mod_base = OTHER; note = 2'-O-methyladenosine-3'-phosphate
  modified_base 6: mod_base = OTHER; note = 2'-O-methyluridine-3'-phosphate
  modified_base 8: mod_base = OTHER; note = 2'-O-methylguanosine-3'-phosphate
  modified_base 9: mod_base = OTHER; note = 2'-O-methyladenosine-3'-phosphate
  modified_base 10: mod_base = OTHER; note = 2'-O-methyladenosine-3'-phosphate
  modified_base 11: mod_base = OTHER; note = 2'-O-methyluridine-3'-phosphate
  modified_base 13: mod_base = OTHER; note = 2'-O-methylguanosine-3'-phosphate
  modified_base 14: mod_base = OTHER; note = 2'-deoxy-2'-fluorouridine-3'-phosphate
  modified_base 15: mod_base = OTHER; note = 2'-O-methyladenosine-3'-phosphate
  modified_base 16: mod_base = OTHER; note = 2'-O-methyluridine-3'-phosphate
  modified_base 17: mod_base = OTHER; note = 2'-O-methyluridine-3'-phosphate
  modified_base 18: mod_base = OTHER; note = 2'-O-methyluridine-3'-phosphate
  modified_base 19: mod_base = OTHER; note = 2'-O-methyladenosine-3'-phosphate
  modified_base 20: mod_base = OTHER; note = 2'-O-methylguanosine-3'-phosphate
  modified_base 21: mod_base = OTHER; note = 2'-O-methyluridine-3'-phosphorothioate
  modified_base 22: mod_base = OTHER; note = 2'-O-methylcytidine-3'-phosphorothioate
  modified_base 23: mod_base = OTHER; note = 2'-O-methylcytidine
  misc_feature 1: note = RNA
  misc_feature 3..4: note = RNA
  misc_feature 6: note = RNA
  misc_feature 8..11: note = RNA
  misc_feature 13..23: note = RNA
  misc_feature 2: note = DNA
  misc_feature 5: note = DNA
  misc_feature 7: note = DNA
  misc_feature 12: note = DNA
tacaatggaatggtatttagtcc

SEQ ID NO: 1187 - DNA, 23 bp, synthetic construct
  source 1..23: mol_type = other DNA
  modified_base 1: mod_base = OTHER; note = 2'-O-methyluridine-3'-phosphate 5'-(E)-Vinylphosphonate
  modified_base 3: mod_base = OTHER; note = 2'-O-methyladenosine-3'-phosphate
  modified_base 4: mod_base = OTHER; note = 2'-O-methylcytidine-3'-phosphate
  modified_base 6: mod_base = OTHER; note = 2'-O-methyladenosine-3'-phosphate
  modified_base 8: mod_base = OTHER; note = 2'-O-methylguanosine-3'-phosphate
  modified_base 9: mod_base = OTHER; note = 2'-O-methylguanosine-3'-phosphate
  modified_base 10: mod_base = OTHER; note = 2'-O-methyladenosine-3'-phosphate
  modified_base 11: mod_base = OTHER; note = 2'-O-methyladenosine-3'-phosphate
  modified_base 13: mod_base = OTHER; note = 2'-O-methylguanosine-3'-phosphate
  modified_base 14: mod_base = OTHER; note = 2'-deoxy-2'-fluoroguanosine-3'-phosphate
  modified_base 15: mod_base = OTHER; note = 2'-O-methyluridine-3'-phosphate
  modified_base 16: mod_base = OTHER; note = 2'-O-methyladenosine-3'-phosphate
  modified_base 17: mod_base = OTHER; note = 2'-O-methyluridine-3'-phosphate
  modified_base 18: mod_base = OTHER; note = 2'-O-methyluridine-3'-phosphate
  modified_base 19: mod_base = OTHER; note = 2'-O-methyluridine-3'-phosphate
  modified_base 20: mod_base = OTHER; note = 2'-O-methyladenosine-3'-phosphate
  modified_base 21: mod_base = OTHER; note = 2'-O-methylguanosine-3'-phosphorothioate
  modified_base 22: mod_base = OTHER; note = 2'-O-methyluridine-3'-phosphorothioate
  modified_base 23: mod_base = OTHER; note = 2'-O-methylcytidine
  misc_feature 1: note = RNA
  misc_feature 3..4: note = RNA
  misc_feature 6: note = RNA
  misc_feature 8..11: note = RNA
  misc_feature 13..23: note = RNA
  misc_feature 2: note = DNA
  misc_feature 5: note = DNA
  misc_feature 7: note = DNA
  misc_feature 12: note = DNA
taacaatggaatggtatttagtc

SEQ ID NO: 1188 - DNA, 23 bp, synthetic construct
  source 1..23: mol_type = other DNA
  modified_base 1: mod_base = OTHER; note = 2'-O-methyluridine-3'-phosphate 5'-(E)-Vinylphosphonate
  modified_base 3: mod_base = OTHER; note = 2'-O-methyladenosine-3'-phosphate
  modified_base 4: mod_base = OTHER; note = 2'-O-methyladenosine-3'-phosphate
  modified_base 6: mod_base = OTHER; note = 2'-O-methyladenosine-3'-phosphate
  modified_base 8: mod_base = OTHER; note = 2'-O-methyluridine-3'-phosphate
  modified_base 9: mod_base = OTHER; note = 2'-O-methylguanosine-3'-phosphate
  modified_base 10: mod_base = OTHER; note = 2'-O-methylguanosine-3'-phosphate
  modified_base 11: mod_base = OTHER; note = 2'-O-methyladenosine-3'-phosphate
  modified_base 13: mod_base = OTHER; note = 2'-O-methyluridine-3'-phosphate
  modified_base 14: mod_base = OTHER; note = 2'-deoxy-2'-fluoroguanosine-3'-phosphate
  modified_base 15: mod_base = OTHER; note = 2'-O-methylguanosine-3'-phosphate
  modified_base 16: mod_base = OTHER; note = 2'-O-methyluridine-3'-phosphate
  modified_base 17: mod_base = OTHER; note = 2'-O-methyladenosine-3'-phosphate
  modified_base 18: mod_base = OTHER; note = 2'-O-methyluridine-3'-phosphate
  modified_base 19: mod_base = OTHER; note = 2'-O-methyluridine-3'-phosphate
  modified_base 20: mod_base = OTHER; note = 2'-O-methyluridine-3'-phosphate
  modified_base 21: mod_base = OTHER; note = 2'-O-methyladenosine-3'-phosphorothioate
  modified_base 22: mod_base = OTHER; note = 2'-O-methylguanosine-3'-phosphorothioate
  modified_base 23: mod_base = OTHER; note = 2'-O-methyluridine
  misc_feature 1: note = RNA
  misc_feature 3..4: note = RNA
  misc_feature 6: note = RNA
  misc_feature 8..11: note = RNA
  misc_feature 13..23: note = RNA
  misc_feature 2: note = DNA
  misc_feature 5: note = DNA
  misc_feature 7: note = DNA
  misc_feature 12: note = DNA
taaacaatggaatggtatttagt

SEQ ID NO: 1189 - DNA, 23 bp, synthetic construct
  source 1..23: mol_type = other DNA
  modified_base 1: mod_base = OTHER; note = 2'-O-methyluridine-3'-phosphate 5'-(E)-Vinylphosphonate
  modified_base 3: mod_base = OTHER; note = 2'-O-methyladenosine-3'-phosphate
  modified_base 4: mod_base = OTHER; note = 2'-O-methyladenosine-3'-phosphate
  modified_base 6: mod_base = OTHER; note = 2'-O-methylcytidine-3'-phosphate
  modified_base 8: mod_base = OTHER; note = 2'-O-methyladenosine-3'-phosphate
  modified_base 9: mod_base = OTHER; note = 2'-O-methyluridine-3'-phosphate
  modified_base 10: mod_base = OTHER; note = 2'-O-methylguanosine-3'-phosphate
  modified_base 11: mod_base = OTHER; note = 2'-O-methylguanosine-3'-phosphate
  modified_base 13: mod_base = OTHER; note = 2'-O-methyladenosine-3'-phosphate
  modified_base 14: mod_base = OTHER; note = 2'-deoxy-2'-fluorouridine-3'-phosphate
  modified_base 15: mod_base = OTHER; note = 2'-O-methylguanosine-3'-phosphate
  modified_base 16: mod_base = OTHER; note = 2'-O-methylguanosine-3'-phosphate
  modified_base 17: mod_base = OTHER; note = 2'-O-methyluridine-3'-phosphate
  modified_base 18: mod_base = OTHER; note = 2'-O-methyladenosine-3'-phosphate
  modified_base 19: mod_base = OTHER; note = 2'-O-methyluridine-3'-phosphate
  modified_base 20: mod_base = OTHER; note = 2'-O-methyluridine-3'-phosphate
  modified_base 21: mod_base = OTHER; note = 2'-O-methyluridine-3'-phosphorothioate
  modified_base 22: mod_base = OTHER; note = 2'-O-methyladenosine-3'-phosphorothioate
  modified_base 23: mod_base = OTHER; note = 2'-O-methylguanosine
  misc_feature 1: note = RNA
  misc_feature 3..4: note = RNA
  misc_feature 6: note = RNA
  misc_feature 8..11: note = RNA
  misc_feature 13..23: note = RNA
  misc_feature 2: note = DNA
  misc_feature 5: note = DNA
  misc_feature 7: note = DNA
  misc_feature 12: note = DNA
tcaaacaatggaatggtatttag

SEQ ID NO: 1190 - DNA, 23 bp, synthetic construct
  source 1..23: mol_type = other DNA
  modified_base 1: mod_base = OTHER; note = 2'-O-methyluridine-3'-phosphate 5'-(E)-Vinylphosphonate
  modified_base 3: mod_base = OTHER; note = 2'-O-methylcytidine-3'-phosphate
  modified_base 4: mod_base = OTHER; note = 2'-O-methyladenosine-3'-phosphate
  modified_base 6: mod_base = OTHER; note = 2'-O-methyladenosine-3'-phosphate
  modified_base 8: mod_base = OTHER; note = 2'-O-methyladenosine-3'-phosphate
  modified_base 9: mod_base = OTHER; note = 2'-O-methyladenosine-3'-phosphate
  modified_base 10: mod_base = OTHER; note = 2'-O-methyluridine-3'-phosphate
  modified_base 11: mod_base = OTHER; note = 2'-O-methylguanosine-3'-phosphate
  modified_base 13: mod_base = OTHER; note = 2'-O-methyladenosine-3'-phosphate
  modified_base 14: mod_base = OTHER; note = 2'-deoxy-2'-fluoroadenosine-3'-phosphate
  modified_base 15: mod_base = OTHER; note = 2'-O-methyluridine-3'-phosphate
  modified_base 16: mod_base = OTHER; note = 2'-O-methylguanosine-3'-phosphate
  modified_base 17: mod_base = OTHER; note = 2'-O-methylguanosine-3'-phosphate
  modified_base 18: mod_base = OTHER; note = 2'-O-methyluridine-3'-phosphate
  modified_base 19: mod_base = OTHER; note = 2'-O-methyladenosine-3'-phosphate
  modified_base 20: mod_base = OTHER; note = 2'-O-methyluridine-3'-phosphate
  modified_base 21: mod_base = OTHER; note = 2'-O-methyluridine-3'-phosphorothioate
  modified_base 22: mod_base = OTHER; note = 2'-O-methyluridine-3'-phosphorothioate
  modified_base 23: mod_base = OTHER; note = 2'-O-methyladenosine
  misc_feature 1: note = RNA
  misc_feature 3..4: note = RNA
  misc_feature 6: note = RNA
  misc_feature 8..11: note = RNA
  misc_feature 13..23: note = RNA
  misc_feature 2: note = DNA
  misc_feature 5: note = DNA
  misc_feature 7: note = DNA
  misc_feature 12: note = DNA
tacaaacaatggaatggtattta

SEQ ID NO: 1191 - DNA, 23 bp, synthetic construct
  source 1..23: mol_type = other DNA
  modified_base 1: mod_base = OTHER; note = 2'-O-methyluridine-3'-phosphate 5'-(E)-Vinylphosphonate
  modified_base 3: mod_base = OTHER; note = 2'-O-methyladenosine-3'-phosphate
  modified_base 4: mod_base = OTHER; note = 2'-O-methylcytidine-3'-phosphate
  modified_base 6: mod_base = OTHER; note = 2'-O-methyladenosine-3'-phosphate
  modified_base 8: mod_base = OTHER; note = 2'-O-methylcytidine-3'-phosphate
  modified_base 9: mod_base = OTHER; note = 2'-O-methyladenosine-3'-phosphate
  modified_base 10: mod_base = OTHER; note = 2'-O-methyladenosine-3'-phosphate
  modified_base 11: mod_base = OTHER; note = 2'-O-methyluridine-3'-phosphate
  modified_base 13: mod_base = OTHER; note = 2'-O-methylguanosine-3'-phosphate
  modified_base 14: mod_base = OTHER; note = 2'-deoxy-2'-fluoroadenosine-3'-phosphate
  modified_base 15: mod_base = OTHER; note = 2'-O-methyladenosine-3'-phosphate
  modified_base 16: mod_base = OTHER; note = 2'-O-methyluridine-3'-phosphate
  modified_base 17: mod_base = OTHER; note = 2'-O-methylguanosine-3'-phosphate
  modified_base 18: mod_base = OTHER; note = 2'-O-methylguanosine-3'-phosphate
  modified_base 19: mod_base = OTHER; note = 2'-O-methyluridine-3'-phosphate
  modified_base 20: mod_base = OTHER; note = 2'-O-methyladenosine-3'-phosphate
  modified_base 21: mod_base = OTHER; note = 2'-O-methyluridine-3'-phosphorothioate
  modified_base 22: mod_base = OTHER; note = 2'-O-methyluridine-3'-phosphorothioate
  modified_base 23: mod_base = OTHER; note = 2'-O-methyluridine
  misc_feature 1: note = RNA
  misc_feature 3..4: note = RNA
  misc_feature 6: note = RNA
  misc_feature 8..11: note = RNA
  misc_feature 13..23: note = RNA
  misc_feature 2: note = DNA
  misc_feature 5: note = DNA
  misc_feature 7: note = DNA
  misc_feature 12: note = DNA
tcacaaacaatggaatggtattt

SEQ ID NO: 1192 - DNA, 23 bp, synthetic construct
  source 1..23: mol_type = other DNA
  modified_base 1: mod_base = OTHER; note = 2'-O-methyluridine-3'-phosphate 5'-(E)-Vinylphosphonate
  modified_base 3: mod_base = OTHER; note = 2'-O-methyladenosine-3'-phosphate
  modified_base 4: mod_base = OTHER; note = 2'-O-methylcytidine-3'-phosphate
  modified_base 6: mod_base = OTHER; note = 2'-O-methyladenosine-3'-phosphate
  modified_base 8: mod_base = OTHER; note = 2'-O-methylcytidine-3'-phosphate
  modified_base 9: mod_base = OTHER; note = 2'-O-methyladenosine-3'-phosphate
  modified_base 10: mod_base = OTHER; note = 2'-O-methyladenosine-3'-phosphate
  modified_base 11: mod_base = OTHER; note = 2'-O-methyluridine-3'-phosphate
  modified_base 13: mod_base = OTHER; note = 2'-O-methylguanosine-3'-phosphate
  modified_base 14: mod_base = OTHER; note = 2'-deoxy-2'-fluoroadenosine-3'-phosphate
  modified_base 15: mod_base = OTHER; note = 2'-O-methyladenosine-3'-phosphate
  modified_base 16: mod_base = OTHER; note = 2'-O-methyluridine-3'-phosphate
  modified_base 17: mod_base = OTHER; note = 2'-O-methylguanosine-3'-phosphate
  modified_base 18: mod_base = OTHER; note = 2'-O-methylguanosine-3'-phosphate
  modified_base 19: mod_base = OTHER; note = 2'-O-methyluridine-3'-phosphate
  modified_base 20: mod_base = OTHER; note = 2'-O-methyladenosine-3'-phosphate
  modified_base 21: mod_base = OTHER; note = 2'-O-methyluridine-3'-phosphorothioate
  modified_base 22: mod_base = OTHER; note = 2'-O-methyluridine-3'-phosphorothioate
  modified_base 23: mod_base = OTHER; note = 2'-O-methyluridine
  misc_feature 1: note = RNA
  misc_feature 3..4: note = RNA
  misc_feature 6: note = RNA
  misc_feature 8..11: note = RNA
  misc_feature 13..23: note = RNA
  misc_feature 2: note = DNA
  misc_feature 5: note = DNA
  misc_feature 7: note = DNA
  misc_feature 12: note = DNA
tcacaaacaatggaatggtattt

SEQ ID NO: 1193 - DNA, 23 bp, synthetic construct
  source 1..23: mol_type = other DNA
  modified_base 1: mod_base = OTHER; note = 2'-O-methyluridine-3'-phosphate 5'-(E)-Vinylphosphonate
  modified_base 3: mod_base = OTHER; note = 2'-O-methylcytidine-3'-phosphate
  modified_base 4: mod_base = OTHER; note = 2'-O-methyladenosine-3'-phosphate
  modified_base 6: mod_base = OTHER; note = 2'-O-methyladenosine-3'-phosphate
  modified_base 8: mod_base = OTHER; note = 2'-O-methyladenosine-3'-phosphate
  modified_base 9: mod_base = OTHER; note = 2'-O-methylcytidine-3'-phosphate
  modified_base 10: mod_base = OTHER; note = 2'-O-methyladenosine-3'-phosphate
  modified_base 11: mod_base = OTHER; note = 2'-O-methyladenosine-3'-phosphate
  modified_base 13: mod_base = OTHER; note = 2'-O-methylguanosine-3'-phosphate
  modified_base 14: mod_base = OTHER; note = 2'-deoxy-2'-fluoroguanosine-3'-phosphate
  modified_base 15: mod_base = OTHER; note = 2'-O-methyladenosine-3'-phosphate
  modified_base 16: mod_base = OTHER; note = 2'-O-methyladenosine-3'-phosphate
  modified_base 17: mod_base = OTHER; note = 2'-O-methyluridine-3'-phosphate
  modified_base 18: mod_base = OTHER; note = 2'-O-methylguanosine-3'-phosphate
  modified_base 19: mod_base = OTHER; note = 2'-O-methylguanosine-3'-phosphate
  modified_base 20: mod_base = OTHER; note = 2'-O-methyluridine-3'-phosphate
  modified_base 21: mod_base = OTHER; note = 2'-O-methyladenosine-3'-phosphorothioate
  modified_base 22: mod_base = OTHER; note = 2'-O-methyluridine-3'-phosphorothioate
  modified_base 23: mod_base = OTHER; note = 2'-O-methyluridine
  misc_feature 1: note = RNA
  misc_feature 3..4: note = RNA
  misc_feature 6: note = RNA
  misc_feature 8..11: note = RNA
  misc_feature 13..23: note = RNA
  misc_feature 2: note = DNA
  misc_feature 5: note = DNA
  misc_feature 7: note = DNA
  misc_feature 12: note = DNA
tgcacaaacaatggaatggtatt

SEQ ID NO: 1194 - DNA, 23 bp, synthetic construct
  source 1..23: mol_type = other DNA
  modified_base 1: mod_base = OTHER; note = 2'-O-methyluridine-3'-phosphate 5'-(E)-Vinylphosphonate
  modified_base 3: mod_base = OTHER; note = 2'-O-methylguanosine-3'-phosphate
  modified_base 4: mod_base = OTHER; note = 2'-O-methylcytidine-3'-phosphate
  modified_base 6: mod_base = OTHER; note = 2'-O-methylcytidine-3'-phosphate
  modified_base 8: mod_base = OTHER; note = 2'-O-methyladenosine-3'-phosphate
  modified_base 9: mod_base = OTHER; note = 2'-O-methyladenosine-3'-phosphate
  modified_base 10: mod_base = OTHER; note = 2'-O-methylcytidine-3'-phosphate
  modified_base 11: mod_base = OTHER; note = 2'-O-methyladenosine-3'-phosphate
  modified_base 13: mod_base = OTHER; note = 2'-O-methyluridine-3'-phosphate
  modified_base 14: mod_base = OTHER; note = 2'-deoxy-2'-fluoroguanosine-3'-phosphate
  modified_base 15: mod_base = OTHER; note = 2'-O-methylguanosine-3'-phosphate
  modified_base 16: mod_base = OTHER; note = 2'-O-methyladenosine-3'-phosphate
  modified_base 17: mod_base = OTHER; note = 2'-O-methyladenosine-3'-phosphate
  modified_base 18: mod_base = OTHER; note = 2'-O-methyluridine-3'-phosphate
  modified_base 19: mod_base = OTHER; note = 2'-O-methylguanosine-3'-phosphate
  modified_base 20: mod_base = OTHER; note = 2'-O-methylguanosine-3'-phosphate
  modified_base 21: mod_base = OTHER; note = 2'-O-methyluridine-3'-phosphorothioate
  modified_base 22: mod_base = OTHER; note = 2'-O-methyladenosine-3'-phosphorothioate
  modified_base 23: mod_base = OTHER; note = 2'-O-methyluridine
  misc_feature 1: note = RNA
  misc_feature 3..4: note = RNA
  misc_feature 6: note = RNA
  misc_feature 8..11: note = RNA
  misc_feature 13..23: note = RNA
  misc_feature 2: note = DNA
  misc_feature 5: note = DNA
  misc_feature 7: note = DNA
  misc_feature 12: note = DNA
ttgcacaaacaatggaatggtat

SEQ ID NO: 1195 - DNA, 23 bp, synthetic construct
  source 1..23: mol_type = other DNA
  modified_base 1: mod_base = OTHER; note = 2'-O-methyluridine-3'-phosphate 5'-(E)-Vinylphosphonate
  modified_base 2: mod_base = OTHER; note = 2'-deoxy-2'-fluorouridine-3'-phosphate
  modified_base 3: mod_base = OTHER; note = 2'-O-methylguanosine-3'-phosphate
  modified_base 4: mod_base = OTHER; note = 2'-O-methylcytidine-3'-phosphate
  modified_base 6: mod_base = OTHER; note = 2'-O-methylcytidine-3'-phosphate
  modified_base 7: mod_base = OTHER; note = Adenosine-glycol nucleic acid (GNA), S-isomer
  modified_base 8: mod_base = OTHER; note = 2'-O-methyladenosine-3'-phosphate
  modified_base 9: mod_base = OTHER; note = 2'-O-methyladenosine-3'-phosphate
  modified_base 10: mod_base = OTHER; note = 2'-O-methylcytidine-3'-phosphate
  modified_base 11: mod_base = OTHER; note = 2'-O-methyladenosine-3'-phosphate
  modified_base 12: mod_base = OTHER; note = 2'-O-methyladenosine-3'-phosphate
  modified_base 13: mod_base = OTHER; note = 2'-O-methyluridine-3'-phosphate
  modified_base 14: mod_base = OTHER; note = 2'-deoxy-2'-fluoroguanosine-3'-phosphate
  modified_base 15: mod_base = OTHER; note = 2'-O-methylguanosine-3'-phosphate
  modified_base 16: mod_base = OTHER; note = 2'-deoxy-2'-fluoroadenosine-3'-phosphate
  modified_base 17: mod_base = OTHER; note = 2'-O-methyladenosine-3'-phosphate
  modified_base 18: mod_base = OTHER; note = 2'-O-methyluridine-3'-phosphate
  modified_base 19: mod_base = OTHER; note = 2'-O-methylguanosine-3'-phosphate
  modified_base 20: mod_base = OTHER; note = 2'-O-methylguanosine-3'-phosphate
  modified_base 21: mod_base = OTHER; note = 2'-O-methyluridine-3'-phosphorothioate
  modified_base 22: mod_base = OTHER; note = 2'-O-methyladenosine-3'-phosphorothioate
  modified_base 23: mod_base = OTHER; note = 2'-O-methyluridine
  misc_feature 1..4: note = RNA
  misc_feature 6..23: note = RNA
  misc_feature 5: note = DNA
ttgcacaaacaatggaatggtat

SEQ ID NO: 1196 - DNA, 23 bp, synthetic construct
  source 1..23: mol_type = other DNA
  modified_base 1: mod_base = OTHER; note = 2'-O-methyluridine-3'-phosphate 5'-(E)-Vinylphosphonate
  modified_base 3: mod_base = OTHER; note = 2'-O-methyluridine-3'-phosphate
  modified_base 4: mod_base = OTHER; note = 2'-O-methylguanosine-3'-phosphate
  modified_base 6: mod_base = OTHER; note = 2'-O-methyladenosine-3'-phosphate
  modified_base 8: mod_base = OTHER; note = 2'-O-methyladenosine-3'-phosphate
  modified_base 9: mod_base = OTHER; note = 2'-O-methyladenosine-3'-phosphate
  modified_base 10: mod_base = OTHER; note = 2'-O-methyladenosine-3'-phosphate
  modified_base 11: mod_base = OTHER; note = 2'-O-methylcytidine-3'-phosphate
  modified_base 13: mod_base = OTHER; note = 2'-O-methyladenosine-3'-phosphate
  modified_base 14: mod_base = OTHER; note = 2'-deoxy-2'-fluorouridine-3'-phosphate
  modified_base 15: mod_base = OTHER; note = 2'-O-methylguanosine-3'-phosphate
  modified_base 16: mod_base = OTHER; note = 2'-O-methylguanosine-3'-phosphate
  modified_base 17: mod_base = OTHER; note = 2'-O-methyladenosine-3'-phosphate
  modified_base 18: mod_base = OTHER; note = 2'-O-methyladenosine-3'-phosphate
  modified_base 19: mod_base = OTHER; note = 2'-O-methyluridine-3'-phosphate
  modified_base 20: mod_base = OTHER; note = 2'-O-methylguanosine-3'-phosphate
  modified_base 21: mod_base = OTHER; note = 2'-O-methylguanosine-3'-phosphorothioate
  modified_base 22: mod_base = OTHER; note = 2'-O-methyluridine-3'-phosphorothioate
  modified_base 23: mod_base = OTHER; note = 2'-O-methyladenosine
  misc_feature 1: note = RNA
  misc_feature 3..4: note = RNA
  misc_feature 6: note = RNA
  misc_feature 8..11: note = RNA
  misc_feature 13..23: note = RNA
  misc_feature 2: note = DNA
  misc_feature 5: note = DNA
  misc_feature 7: note = DNA
  misc_feature 12: note = DNA
tctgcacaaacaatggaatggta

SEQ ID NO: 1197 - DNA, 23 bp, synthetic construct
  source 1..23: mol_type = other DNA
  modified_base 1: mod_base = OTHER; note = 2'-O-methyluridine-3'-phosphate 5'-(E)-Vinylphosphonate
  modified_base 2: mod_base = OTHER; note = 2'-deoxy-2'-fluoroguanosine-3'-phosphate
  modified_base 3: mod_base = OTHER; note = 2'-O-methylcytidine-3'-phosphate
  modified_base 4: mod_base = OTHER; note = 2'-O-methyluridine-3'-phosphate
  modified_base 6: mod_base = OTHER; note = 2'-O-methylcytidine-3'-phosphate
  modified_base 7: mod_base = OTHER; note = Adenosine-glycol nucleic acid (GNA), S-isomer
  modified_base 8: mod_base = OTHER; note = 2'-O-methylcytidine-3'-phosphate
  modified_base 9: mod_base = OTHER; note = 2'-O-methyladenosine-3'-phosphate
  modified_base 10: mod_base = OTHER; note = 2'-O-methyladenosine-3'-phosphate
  modified_base 11: mod_base = OTHER; note = 2'-O-methyladenosine-3'-phosphate
  modified_base 12: mod_base = OTHER; note = 2'-O-methylcytidine-3'-phosphate
  modified_base 13: mod_base = OTHER; note = 2'-O-methyladenosine-3'-phosphate
  modified_base 14: mod_base = OTHER; note = 2'-deoxy-2'-fluoroadenosine-3'-phosphate
  modified_base 15: mod_base = OTHER; note = 2'-O-methyluridine-3'-phosphate
  modified_base 16: mod_base = OTHER; note = 2'-deoxy-2'-fluoroguanosine-3'-phosphate
  modified_base 17: mod_base = OTHER; note = 2'-O-methylguanosine-3'-phosphate
  modified_base 18: mod_base = OTHER; note = 2'-O-methyladenosine-3'-phosphate
  modified_base 19: mod_base = OTHER; note = 2'-O-methyladenosine-3'-phosphate
  modified_base 20: mod_base = OTHER; note = 2'-O-methyluridine-3'-phosphate
  modified_base 21: mod_base = OTHER; note = 2'-O-methylguanosine-3'-phosphorothioate
  modified_base 22: mod_base = OTHER; note = 2'-O-methylguanosine-3'-phosphorothioate
  modified_base 23: mod_base = OTHER; note = 2'-O-methyluridine
  misc_feature 1..4: note = RNA
  misc_feature 6..23: note = RNA
  misc_feature 5: note = DNA
tgctgcacaaacaatggaatggt

SEQ ID NO: 1198 - DNA, 23 bp, synthetic construct
  source 1..23: mol_type = other DNA
  modified_base 1: mod_base = OTHER; note = 2'-O-methyluridine-3'-phosphate 5'-(E)-Vinylphosphonate
  modified_base 2: mod_base = OTHER; note = 2'-deoxy-2'-fluoroguanosine-3'-phosphate
  modified_base 3: mod_base = OTHER; note = 2'-O-methylcytidine-3'-phosphate
  modified_base 4: mod_base = OTHER; note = 2'-O-methyladenosine-3'-phosphate
  modified_base 6: mod_base = OTHER; note = 2'-O-methylcytidine-3'-phosphate
  modified_base 7: mod_base = OTHER; note = Thymidine-glycol nucleic acid (GNA), S-Isomer
  modified_base 8: mod_base = OTHER; note = 2'-O-methylguanosine-3'-phosphate
  modified_base 9: mod_base = OTHER; note = 2'-O-methylcytidine-3'-phosphate
  modified_base 10: mod_base = OTHER; note = 2'-O-methyladenosine-3'-phosphate
  modified_base 11: mod_base = OTHER; note = 2'-O-methylcytidine-3'-phosphate
  modified_base 12: mod_base = OTHER; note = 2'-O-methyladenosine-3'-phosphate
  modified_base 13: mod_base = OTHER; note = 2'-O-methyladenosine-3'-phosphate
  modified_base 14: mod_base = OTHER; note = 2'-deoxy-2'-fluoroadenosine-3'-phosphate
  modified_base 15: mod_base = OTHER; note = 2'-O-methylcytidine-3'-phosphate
  modified_base 16: mod_base = OTHER; note = 2'-deoxy-2'-fluoroadenosine-3'-phosphate
  modified_base 17: mod_base = OTHER; note = 2'-O-methyladenosine-3'-phosphate
  modified_base 18: mod_base = OTHER; note = 2'-O-methyluridine-3'-phosphate
  modified_base 19: mod_base = OTHER; note = 2'-O-methylguanosine-3'-phosphate
  modified_base 20: mod_base = OTHER; note = 2'-O-methylguanosine-3'-phosphate
  modified_base 21: mod_base = OTHER; note = 2'-O-methyladenosine-3'-phosphorothioate
  modified_base 22: mod_base = OTHER; note = 2'-O-methyladenosine-3'-phosphorothioate
  modified_base 23: mod_base = OTHER; note = 2'-O-methyluridine
  misc_feature 1..4: note = RNA
  misc_feature 6..23: note = RNA
  misc_feature 5: note = DNA
tgcagctgcacaaacaatggaat

SEQ ID NO: 1199 - DNA, 23 bp, synthetic construct
  source 1..23: mol_type = other DNA
  modified_base 1: mod_base = OTHER; note = 2'-O-methyluridine-3'-phosphate 5'-(E)-Vinylphosphonate
  modified_base 3: mod_base = OTHER; note = 2'-O-methyladenosine-3'-phosphate
  modified_base 4: mod_base = OTHER; note = 2'-O-methyluridine-3'-phosphate
  modified_base 6: mod_base = OTHER; note = 2'-O-methyladenosine-3'-phosphate
  modified_base 8: mod_base = OTHER; note = 2'-O-methylguanosine-3'-phosphate
  modified_base 9: mod_base = OTHER; note = 2'-O-methylcytidine-3'-phosphate
  modified_base 10: mod_base = OTHER; note = 2'-O-methyladenosine-3'-phosphate
  modified_base 11: mod_base = OTHER; note = 2'-O-methylguanosine-3'-phosphate
  modified_base 13: mod_base = OTHER; note = 2'-O-methyluridine-3'-phosphate
  modified_base 14: mod_base = OTHER; note = 2'-deoxy-2'-fluoroguanosine-3'-phosphate
  modified_base 15: mod_base = OTHER; note = 2'-O-methylcytidine-3'-phosphate
  modified_base 16: mod_base = OTHER; note = 2'-O-methyladenosine-3'-phosphate
  modified_base 17: mod_base = OTHER; note = 2'-O-methylcytidine-3'-phosphate
  modified_base 18: mod_base = OTHER; note = 2'-O-methyladenosine-3'-phosphate
  modified_base 19: mod_base = OTHER; note = 2'-O-methyladenosine-3'-phosphate
  modified_base 20: mod_base = OTHER; note = 2'-O-methyladenosine-3'-phosphate
  modified_base 21: mod_base = OTHER; note = 2'-O-methylcytidine-3'-phosphorothioate
  modified_base 22: mod_base = OTHER; note = 2'-O-methyladenosine-3'-phosphorothioate
  modified_base 23: mod_base = OTHER; note = 2'-O-methyladenosine
  misc_feature 1: note = RNA
  misc_feature 3..4: note = RNA
  misc_feature 6: note = RNA
  misc_feature 8..11: note = RNA
  misc_feature 13..23: note = RNA
  misc_feature 2: note = DNA
  misc_feature 5: note = DNA
  misc_feature 7: note = DNA
  misc_feature 12: note = DNA
taataaagcagctgcacaaacaa

SEQ ID NO: 1200 - DNA, 23 bp, synthetic construct
  source 1..23: mol_type = other DNA
  modified_base 1: mod_base = OTHER; note = 2'-O-methyluridine-3'-phosphate 5'-(E)-Vinylphosphonate
  modified_base 3: mod_base = OTHER; note = 2'-O-methyladenosine-3'-phosphate
  modified_base 4: mod_base = OTHER; note = 2'-O-methylguanosine-3'-phosphate
  modified_base 6: mod_base = OTHER; note = 2'-O-methyladenosine-3'-phosphate
  modified_base 8: mod_base = OTHER; note = 2'-O-methylcytidine-3'-phosphate
  modified_base 9: mod_base = OTHER; note = 2'-O-methyluridine-3'-phosphate
  modified_base 10: mod_base = OTHER; note = 2'-O-methylcytidine-3'-phosphate
  modified_base 11: mod_base = OTHER; note = 2'-O-methyluridine-3'-phosphate
  modified_base 13: mod_base = OTHER; note = 2'-O-methyluridine-3'-phosphate
  modified_base 14: mod_base = OTHER; note = 2'-deoxy-2'-fluorocytidine-3'-phosphate
  modified_base 15: mod_base = OTHER; note = 2'-O-methyladenosine-3'-phosphate
  modified_base 16: mod_base = OTHER; note = 2'-O-methylguanosine-3'-phosphate
  modified_base 17: mod_base = OTHER; note = 2'-O-methyladenosine-3'-phosphate
  modified_base 18: mod_base = OTHER; note = 2'-O-methylguanosine-3'-phosphate
  modified_base 19: mod_base = OTHER; note = 2'-O-methylguanosine-3'-phosphate
  modified_base 20: mod_base = OTHER; note = 2'-O-methyladenosine-3'-phosphate
  modified_base 21: mod_base = OTHER; note = 2'-O-methylguanosine-3'-phosphorothioate
  modified_base 22: mod_base = OTHER; note = 2'-O-methylcytidine-3'-phosphorothioate
  modified_base 23: mod_base = OTHER; note = 2'-O-methyluridine
  misc_feature 1: note = RNA
  misc_feature 3..4: note = RNA
  misc_feature 6: note = RNA
  misc_feature 8..11: note = RNA
  misc_feature 13..23: note = RNA
  misc_feature 2: note = DNA
  misc_feature 5: note = DNA
  misc_feature 7: note = DNA
  misc_feature 12: note = DNA
taagtaactctgtcagaggagct

SEQ ID NO: 1201 - DNA, 23 bp, synthetic construct
  source 1..23: mol_type = other DNA
  modified_base 1: mod_base = OTHER; note = 2'-O-methyluridine-3'-phosphate 5'-(E)-Vinylphosphonate
  modified_base 2: mod_base = OTHER; note = 2'-deoxy-2'-fluorouridine-3'-phosphate
  modified_base 3: mod_base = OTHER; note = 2'-O-methyladenosine-3'-phosphate
  modified_base 4: mod_base = OTHER; note = 2'-O-methylguanosine-3'-phosphate
  modified_base 6: mod_base = OTHER; note = 2'-O-methylguanosine-3'-phosphate
  modified_base 7: mod_base = OTHER; note = Thymidine-glycol nucleic acid (GNA), S-Isomer
  modified_base 8: mod_base = OTHER; note = 2'-O-methylguanosine-3'-phosphate
  modified_base 9: mod_base = OTHER; note = 2'-O-methyladenosine-3'-phosphate
  modified_base 10: mod_base = OTHER; note = 2'-O-methyladenosine-3'-phosphate
  modified_base 11: mod_base = OTHER; note = 2'-O-methylguanosine-3'-phosphate
  modified_base 12: mod_base = OTHER; note = 2'-O-methyluridine-3'-phosphate
  modified_base 13: mod_base = OTHER; note = 2'-O-methyladenosine-3'-phosphate
  modified_base 14: mod_base = OTHER; note = 2'-deoxy-2'-fluoroadenosine-3'-phosphate
  modified_base 15: mod_base = OTHER; note = 2'-O-methylcytidine-3'-phosphate
  modified_base 16: mod_base = OTHER; note = 2'-deoxy-2'-fluorouridine-3'-phosphate
  modified_base 17: mod_base = OTHER; note = 2'-O-methylcytidine-3'-phosphate
  modified_base 18: mod_base = OTHER; note = 2'-O-methyluridine-3'-phosphate
  modified_base 19: mod_base = OTHER; note = 2'-O-methylguanosine-3'-phosphate
  modified_base 20: mod_base = OTHER; note = 2'-O-methyluridine-3'-phosphate
  modified_base 21: mod_base = OTHER; note = 2'-O-methylcytidine-3'-phosphorothioate
  modified_base 22: mod_base = OTHER; note = 2'-O-methyladenosine-3'-phosphorothioate
  modified_base 23: mod_base = OTHER; note = 2'-O-methylguanosine
  misc_feature 1..4: note = RNA
  misc_feature 6..23: note = RNA
  misc_feature 5: note = DNA
ttagagtgaagtaactctgtcag

SEQ ID NO: 1202 - DNA, 23 bp, synthetic construct
  source 1..23: mol_type = other DNA
  modified_base 1: mod_base = OTHER; note = 2'-O-methyluridine-3'-phosphate 5'-(E)-Vinylphosphonate
  modified_base 2: mod_base = OTHER; note = 2'-deoxy-2'-fluoroadenosine-3'-phosphate
  modified_base 3: mod_base = OTHER; note = 2'-O-methyluridine-3'-phosphate
  modified_base 4: mod_base = OTHER; note = 2'-O-methyluridine-3'-phosphate
  modified_base 6: mod_base = OTHER; note = 2'-O-methylcytidine-3'-phosphate
  modified_base 7: mod_base = OTHER; note = Thymidine-glycol nucleic acid (GNA), S-Isomer
  modified_base 8: mod_base = OTHER; note = 2'-O-methyladenosine-3'-phosphate
  modified_base 9: mod_base = OTHER; note = 2'-O-methylguanosine-3'-phosphate
  modified_base 10: mod_base = OTHER; note = 2'-O-methyladenosine-3'-phosphate
  modified_base 11: mod_base = OTHER; note = 2'-O-methylguanosine-3'-phosphate
  modified_base 12: mod_base = OTHER; note = 2'-O-methyluridine-3'-phosphate
  modified_base 13: mod_base = OTHER; note = 2'-O-methylguanosine-3'-phosphate
  modified_base 14: mod_base = OTHER; note = 2'-deoxy-2'-fluoroadenosine-3'-phosphate
  modified_base 15: mod_base = OTHER; note = 2'-O-methyladenosine-3'-phosphate
  modified_base 16: mod_base = OTHER; note = 2'-deoxy-2'-fluoroguanosine-3'-phosphate
  modified_base 17: mod_base = OTHER; note = 2'-O-methyluridine-3'-phosphate
  modified_base 18: mod_base = OTHER; note = 2'-O-methyladenosine-3'-phosphate
  modified_base 19: mod_base = OTHER; note = 2'-O-methyladenosine-3'-phosphate
  modified_base 20: mod_base = OTHER; note = 2'-O-methylcytidine-3'-phosphate
  modified_base 21: mod_base = OTHER; note = 2'-O-methyluridine-3'-phosphorothioate
  modified_base 22: mod_base = OTHER; note = 2'-O-methylcytidine-3'-phosphorothioate
  modified_base 23: mod_base = OTHER; note = 2'-O-methyluridine
  misc_feature 1..4: note = RNA
  misc_feature 6..23: note = RNA
  misc_feature 5: note = DNA
tattcctagagtgaagtaactct

SEQ ID NO: 1203 - DNA, 23 bp, synthetic construct
  source 1..23: mol_type = other DNA
  modified_base 1: mod_base = OTHER; note = 2'-O-methyluridine-3'-phosphate 5'-(E)-Vinylphosphonate
  modified_base 2: mod_base = OTHER; note = 2'-deoxy-2'-fluorouridine-3'-phosphate
  modified_base 3: mod_base = OTHER; note = 2'-O-methyladenosine-3'-phosphate
  modified_base 4: mod_base = OTHER; note = 2'-O-methyladenosine-3'-phosphate
  modified_base 6: mod_base = OTHER; note = 2'-O-methylcytidine-3'-phosphate
  modified_base 7: mod_base = OTHER; note = Thymidine-glycol nucleic acid (GNA), S-Isomer
  modified_base 8: mod_base = OTHER; note = 2'-O-methyluridine-3'-phosphate
  modified_base 9: mod_base = OTHER; note = 2'-O-methylguanosine-3'-phosphate
  modified_base 10: mod_base = OTHER; note = 2'-O-methyluridine-3'-phosphate
  modified_base 11: mod_base = OTHER; note = 2'-O-methylguanosine-3'-phosphate
  modified_base 12: mod_base = OTHER; note = 2'-O-methylguanosine-3'-phosphate
  modified_base 13: mod_base = OTHER; note = 2'-O-methylcytidine-3'-phosphate
  modified_base 14: mod_base = OTHER; note = 2'-deoxy-2'-fluorouridine-3'-phosphate
  modified_base 15: mod_base = OTHER; note = 2'-O-methyluridine-3'-phosphate
  modified_base 16: mod_base = OTHER; note = 2'-deoxy-2'-fluoroguanosine-3'-phosphate
  modified_base 17: mod_base = OTHER; note = 2'-O-methyluridine-3'-phosphate
  modified_base 18: mod_base = OTHER; note = 2'-O-methylcytidine-3'-phosphate
  modified_base 19: mod_base = OTHER; note = 2'-O-methylcytidine-3'-phosphate
  modified_base 20: mod_base = OTHER; note = 2'-O-methyluridine-3'-phosphate
  modified_base 21: mod_base = OTHER; note = 2'-O-methylcytidine-3'-phosphorothioate
  modified_base 22: mod_base = OTHER; note = 2'-O-methyladenosine-3'-phosphorothioate
  modified_base 23: mod_base = OTHER; note = 2'-O-methylguanosine
  misc_feature 1..4: note = RNA
  misc_feature 6..23: note = RNA
  misc_feature 5: note = DNA
ttaatcttgtggcttgtcctcag

SEQ ID NO: 1204 - DNA, 23 bp, synthetic construct
  source 1..23: mol_type = other DNA
  modified_base 1: mod_base = OTHER; note = 2'-O-methyluridine-3'-phosphate 5'-(E)-Vinylphosphonate
  modified_base 3: mod_base = OTHER; note = 2'-O-methylcytidine-3'-phosphate
  modified_base 4: mod_base = OTHER; note = 2'-O-methylguanosine-3'-phosphate
  modified_base 6: mod_base = OTHER; note = 2'-O-methyluridine-3'-phosphate
  modified_base 8: mod_base = OTHER; note = 2'-O-methylcytidine-3'-phosphate
  modified_base 9: mod_base = OTHER; note = 2'-O-methyluridine-3'-phosphate
  modified_base 10: mod_base = OTHER; note = 2'-O-methyluridine-3'-phosphate
  modified_base 11: mod_base = OTHER; note = 2'-O-methylguanosine-3'-phosphate
  modified_base 13: mod_base = OTHER; note = 2'-O-methyladenosine-3'-phosphate
  modified_base 14: mod_base = OTHER; note = 2'-deoxy-2'-fluoroadenosine-3'-phosphate
  modified_base 15: mod_base = OTHER; note = 2'-O-methyluridine-3'-phosphate
  modified_base 16: mod_base = OTHER; note = 2'-O-methylcytidine-3'-phosphate
  modified_base 17: mod_base = OTHER; note = 2'-O-methyluridine-3'-phosphate
  modified_base 18: mod_base = OTHER; note = 2'-O-methyluridine-3'-phosphate
  modified_base 19: mod_base = OTHER; note = 2'-O-methylguanosine-3'-phosphate
  modified_base 20: mod_base = OTHER; note = 2'-O-methyluridine-3'-phosphate
  modified_base 21: mod_base = OTHER; note = 2'-O-methylguanosine-3'-phosphorothioate
  modified_base 22: mod_base = OTHER; note = 2'-O-methylguanosine-3'-phosphorothioate
  modified_base 23: mod_base = OTHER; note = 2'-O-methylcytidine
  misc_feature 1: note = RNA
  misc_feature 3..4: note = RNA
  misc_feature 6: note = RNA
  misc_feature 8..11: note = RNA
  misc_feature 13..23: note = RNA
  misc_feature 2: note = DNA
  misc_feature 5: note = DNA
  misc_feature 7: note = DNA
  misc_feature 12: note = DNA
tccgtttcttgtaatcttgtggc

SEQ ID NO: 1205 - DNA, 23 bp, synthetic construct
  source 1..23: mol_type = other DNA
  modified_base 1: mod_base = OTHER; note = 2'-O-methyluridine-3'-phosphate 5'-(E)-Vinylphosphonate
  modified_base 3: mod_base = OTHER; note = 2'-O-methylcytidine-3'-phosphate
  modified_base 4: mod_base = OTHER; note = 2'-O-methylcytidine-3'-phosphate
  modified_base 6: mod_base = OTHER; note = 2'-O-methyluridine-3'-phosphate
  modified_base 8: mod_base = OTHER; note = 2'-O-methyluridine-3'-phosphate
  modified_base 9: mod_base = OTHER; note = 2'-O-methylcytidine-3'-phosphate
  modified_base 10: mod_base = OTHER; note = 2'-O-methyluridine-3'-phosphate
  modified_base 11: mod_base = OTHER; note = 2'-O-methyluridine-3'-phosphate
  modified_base 13: mod_base = OTHER; note = 2'-O-methyluridine-3'-phosphate
  modified_base 14: mod_base = OTHER; note = 2'-deoxy-2'-fluoroadenosine-3'-phosphate
  modified_base 15: mod_base = OTHER; note = 2'-O-methyladenosine-3'-phosphate
  modified_base 16: mod_base = OTHER; note = 2'-O-methyluridine-3'-phosphate
  modified_base 17: mod_base = OTHER; note = 2'-O-methylcytidine-3'-phosphate
  modified_base 18: mod_base = OTHER; note = 2'-O-methyluridine-3'-phosphate
  modified_base 19: mod_base = OTHER; note = 2'-O-methyluridine-3'-phosphate
  modified_base 20: mod_base = OTHER; note = 2'-O-methylguanosine-3'-phosphate
  modified_base 21: mod_base = OTHER; note = 2'-O-methyluridine-3'-phosphorothioate
  modified_base 22: mod_base = OTHER; note = 2'-O-methylguanosine-3'-phosphorothioate
  modified_base 23: mod_base = OTHER; note = 2'-O-methylguanosine
  misc_feature 1: note = RNA
  misc_feature 3..4: note = RNA
  misc_feature 6: note = RNA
  misc_feature 8..11: note = RNA
  misc_feature 13..23: note = RNA
  misc_feature 2: note = DNA
  misc_feature 5: note = DNA
  misc_feature 7: note = DNA
  misc_feature 12: note = DNA
tgccgtttcttgtaatcttgtgg

SEQ ID NO: 1206 - DNA, 23 bp, synthetic construct
  source 1..23: mol_type = other DNA
  modified_base 1: mod_base = OTHER; note = 2'-O-methyluridine-3'-phosphate 5'-(E)-Vinylphosphonate
  modified_base 3: mod_base = OTHER; note = 2'-O-methylguanosine-3'-phosphate
  modified_base 4: mod_base = OTHER; note = 2'-O-methylcytidine-3'-phosphate
  modified_base 6: mod_base = OTHER; note = 2'-O-methylguanosine-3'-phosphate
  modified_base 8: mod_base = OTHER; note = 2'-O-methyluridine-3'-phosphate
  modified_base 9: mod_base = OTHER; note = 2'-O-methyluridine-3'-phosphate
  modified_base 10: mod_base = OTHER; note = 2'-O-methylcytidine-3'-phosphate
  modified_base 11: mod_base = OTHER; note = 2'-O-methyluridine-3'-phosphate
  modified_base 13: mod_base = OTHER; note = 2'-O-methylguanosine-3'-phosphate
  modified_base 14: mod_base = OTHER; note = 2'-deoxy-2'-fluorouridine-3'-phosphate
  modified_base 15: mod_base = OTHER; note = 2'-O-methyladenosine-3'-phosphate
  modified_base 16: mod_base = OTHER; note = 2'-O-methyladenosine-3'-phosphate
  modified_base 17: mod_base = OTHER; note = 2'-O-methyluridine-3'-phosphate
  modified_base 18: mod_base = OTHER; note = 2'-O-methylcytidine-3'-phosphate
  modified_base 19: mod_base = OTHER; note = 2'-O-methyluridine-3'-phosphate
  modified_base 20: mod_base = OTHER; note = 2'-O-methyluridine-3'-phosphate
  modified_base 21: mod_base = OTHER; note = 2'-O-methylguanosine-3'-phosphorothioate
  modified_base 22: mod_base = OTHER; note = 2'-O-methyluridine-3'-phosphorothioate
  modified_base 23: mod_base = OTHER; note = 2'-O-methylguanosine
  misc_feature 1: note = RNA
  misc_feature 3..4: note = RNA
  misc_feature 6: note = RNA
  misc_feature 8..11: note = RNA
  misc_feature 13..23: note = RNA
  misc_feature 2: note = DNA
  misc_feature 5: note = DNA
  misc_feature 7: note = DNA
  misc_feature 12: note = DNA
tagccgtttcttgtaatcttgtg

SEQ ID NO: 1207 - DNA, 23 bp, synthetic construct
  source 1..23: mol_type = other DNA
  modified_base 1: mod_base = OTHER; note = 2'-O-methyluridine-3'-phosphate 5'-(E)-Vinylphosphonate
  modified_base 3: mod_base = OTHER; note = 2'-O-methyladenosine-3'-phosphate
  modified_base 4: mod_base = OTHER; note = 2'-O-methylguanosine-3'-phosphate
  modified_base 6: mod_base = OTHER; note = 2'-O-methylcytidine-3'-phosphate
  modified_base 8: mod_base = OTHER; note = 2'-O-methyluridine-3'-phosphate
  modified_base 9: mod_base = OTHER; note = 2'-O-methyluridine-3'-phosphate
  modified_base 10: mod_base = OTHER; note = 2'-O-methyluridine-3'-phosphate
  modified_base 11: mod_base = OTHER; note = 2'-O-methylcytidine-3'-phosphate
  modified_base 13: mod_base = OTHER; note = 2'-O-methyluridine-3'-phosphate
  modified_base 14: mod_base = OTHER; note = 2'-deoxy-2'-fluoroguanosine-3'-phosphate
  modified_base 15: mod_base = OTHER; note = 2'-O-methyluridine-3'-phosphate
  modified_base 16: mod_base = OTHER; note = 2'-O-methyladenosine-3'-phosphate
  modified_base 17: mod_base = OTHER; note = 2'-O-methyladenosine-3'-phosphate
  modified_base 18: mod_base = OTHER; note = 2'-O-methyluridine-3'-phosphate
  modified_base 19: mod_base = OTHER; note = 2'-O-methylcytidine-3'-phosphate
  modified_base 20: mod_base = OTHER; note = 2'-O-methyluridine-3'-phosphate
  modified_base 21: mod_base = OTHER; note = 2'-O-methyluridine-3'-phosphorothioate
  modified_base 22: mod_base = OTHER; note = 2'-O-methylguanosine-3'-phosphorothioate
  modified_base 23: mod_base = OTHER; note = 2'-O-methyluridine
  misc_feature 1: note = RNA
  misc_feature 3..4: note = RNA
  misc_feature 6: note = RNA
  misc_feature 8..11: note = RNA
  misc_feature 13..23: note = RNA
  misc_feature 2: note = DNA
  misc_feature 5: note = DNA
  misc_feature 7: note = DNA
  misc_feature 12: note = DNA
taagccgtttcttgtaatcttgt

SEQ ID NO: 1208 - DNA, 23 bp, synthetic construct
  source 1..23: mol_type = other DNA
  modified_base 1: mod_base = OTHER; note = 2'-O-methyluridine-3'-phosphate 5'-(E)-Vinylphosphonate
  modified_base 3: mod_base = OTHER; note = 2'-O-methyluridine-3'-phosphate
  modified_base 4: mod_base = OTHER; note = 2'-O-methylguanosine-3'-phosphate
  modified_base 6: mod_base = OTHER; note = 2'-O-methyladenosine-3'-phosphate
  modified_base 8: mod_base = OTHER; note = 2'-O-methylguanosine-3'-phosphate
  modified_base 9: mod_base = OTHER; note = 2'-O-methylcytidine-3'-phosphate
  modified_base 10: mod_base = OTHER; note = 2'-O-methylcytidine-3'-phosphate
  modified_base 11: mod_base = OTHER; note = 2'-O-methylguanosine-3'-phosphate
  modified_base 13: mod_base = OTHER; note = 2'-O-methyluridine-3'-phosphate
  modified_base 14: mod_base = OTHER; note = 2'-deoxy-2'-fluorouridine-3'-phosphate
  modified_base 15: mod_base = OTHER; note = 2'-O-methylcytidine-3'-phosphate
  modified_base 16: mod_base = OTHER; note = 2'-O-methyluridine-3'-phosphate
  modified_base 17: mod_base = OTHER; note = 2'-O-methyluridine-3'-phosphate
  modified_base 18: mod_base = OTHER; note = 2'-O-methylguanosine-3'-phosphate
  modified_base 19: mod_base = OTHER; note = 2'-O-methyluridine-3'-phosphate
  modified_base 20: mod_base = OTHER; note = 2'-O-methyladenosine-3'-phosphate
  modified_base 21: mod_base = OTHER; note = 2'-O-methyladenosine-3'-phosphorothioate
  modified_base 22: mod_base = OTHER; note = 2'-O-methyluridine-3'-phosphorothioate
  modified_base 23: mod_base = OTHER; note = 2'-O-methylcytidine
  misc_feature 1: note = RNA
  misc_feature 3..4: note = RNA
  misc_feature 6: note = RNA
  misc_feature 8..11: note = RNA
  misc_feature 13..23: note = RNA
  misc_feature 2: note = DNA
  misc_feature 5: note = DNA
  misc_feature 7: note = DNA
  misc_feature 12: note = DNA
tctgaaagccgtttcttgtaatc

SEQ ID NO: 1209 - DNA, 23 bp, synthetic construct
  source 1..23: mol_type = other DNA
  modified_base 1: mod_base = OTHER; note = 2'-O-methyluridine-3'-phosphate 5'-(E)-Vinylphosphonate
  modified_base 3: mod_base = OTHER; note = 2'-O-methylcytidine-3'-phosphate
  modified_base 4: mod_base = OTHER; note = 2'-O-methyluridine-3'-phosphate
  modified_base 6: mod_base = OTHER; note = 2'-O-methyladenosine-3'-phosphate
  modified_base 8: mod_base = OTHER; note = 2'-O-methyladenosine-3'-phosphate
  modified_base 9: mod_base = OTHER; note = 2'-O-methylguanosine-3'-phosphate
  modified_base 10: mod_base = OTHER; note = 2'-O-methylcytidine-3'-phosphate
  modified_base 11: mod_base = OTHER; note = 2'-O-methylcytidine-3'-phosphate
  modified_base 13: mod_base = OTHER; note = 2'-O-methyluridine-3'-phosphate
  modified_base 14: mod_base = OTHER; note = 2'-deoxy-2'-fluorouridine-3'-phosphate
  modified_base 15: mod_base = OTHER; note = 2'-O-methyluridine-3'-phosphate
  modified_base 16: mod_base = OTHER; note = 2'-O-methylcytidine-3'-phosphate
  modified_base 17: mod_base = OTHER; note = 2'-O-methyluridine-3'-phosphate
  modified_base 18: mod_base = OTHER; note = 2'-O-methyluridine-3'-phosphate
  modified_base 19: mod_base = OTHER; note = 2'-O-methylguanosine-3'-phosphate
  modified_base 20: mod_base = OTHER; note = 2'-O-methyluridine-3'-phosphate
  modified_base 21: mod_base = OTHER; note = 2'-O-methyladenosine-3'-phosphorothioate
  modified_base 22: mod_base = OTHER; note = 2'-O-methyladenosine-3'-phosphorothioate
  modified_base 23: mod_base = OTHER; note = 2'-O-methyluridine
  misc_feature 1: note = RNA
  misc_feature 3..4: note = RNA
  misc_feature 6: note = RNA
  misc_feature 8..11: note = RNA
  misc_feature 13..23: note = RNA
  misc_feature 2: note = DNA
  misc_feature 5: note = DNA
  misc_feature 7: note = DNA
  misc_feature 12: note = DNA
tactgaaagccgtttcttgtaat

SEQ ID NO: 1210 - DNA, 23 bp, synthetic construct
  source 1..23: mol_type = other DNA
  modified_base 1: mod_base = OTHER; note = 2'-O-methyluridine-3'-phosphate 5'-(E)-Vinylphosphonate
  modified_base 2: mod_base = OTHER; note = 2'-deoxy-2'-fluoroadenosine-3'-phosphate
  modified_base 3: mod_base = OTHER; note = 2'-O-methylguanosine-3'-phosphate
  modified_base 4: mod_base = OTHER; note = 2'-O-methylcytidine-3'-phosphate
  modified_base 6: mod_base = OTHER; note = 2'-O-methylcytidine-3'-phosphate
  modified_base 7: mod_base = OTHER; note = Adenosine-glycol nucleic acid (GNA), S-isomer
  modified_base 8: mod_base = OTHER; note = 2'-O-methyladenosine-3'-phosphate
  modified_base 9: mod_base = OTHER; note = 2'-O-methylcytidine-3'-phosphate
  modified_base 10: mod_base = OTHER; note = 2'-O-methyluridine-3'-phosphate
  modified_base 11: mod_base = OTHER; note = 2'-O-methylguanosine-3'-phosphate
  modified_base 12: mod_base = OTHER; note = 2'-O-methyladenosine-3'-phosphate
  modified_base 13: mod_base = OTHER; note = 2'-O-methyladenosine-3'-phosphate
  modified_base 14: mod_base = OTHER; note = 2'-deoxy-2'-fluoroadenosine-3'-phosphate
  modified_base 15: mod_base = OTHER; note = 2'-O-methylguanosine-3'-phosphate
  modified_base 16: mod_base = OTHER; note = 2'-deoxy-2'-fluorocytidine-3'-phosphate
  modified_base 17: mod_base = OTHER; note = 2'-O-methylcytidine-3'-phosphate
  modified_base 18: mod_base = OTHER; note = 2'-O-methylguanosine-3'-phosphate
  modified_base 19: mod_base = OTHER; note = 2'-O-methyluridine-3'-phosphate
  modified_base 20: mod_base = OTHER; note = 2'-O-methyluridine-3'-phosphate
  modified_base 21: mod_base = OTHER; note = 2'-O-methyluridine-3'-phosphorothioate
  modified_base 22: mod_base = OTHER; note = 2'-O-methylcytidine-3'-phosphorothioate
  modified_base 23: mod_base = OTHER; note = 2'-O-methyluridine
  misc_feature 1..4: note = RNA
  misc_feature 6..23: note = RNA
  misc_feature 5: note = DNA
tagctcaactgaaagccgtttct

SEQ ID NO: 1211 - DNA, 23 bp, synthetic construct
  source 1..23: mol_type = other DNA
  modified_base 1: mod_base = OTHER; note = 2'-O-methyluridine-3'-phosphate 5'-(E)-Vinylphosphonate
  modified_base 2: mod_base = OTHER; note = 2'-deoxy-2'-fluorouridine-3'-phosphate
  modified_base 3: mod_base = OTHER; note = 2'-O-methylguanosine-3'-phosphate
  modified_base 4: mod_base = OTHER; note = 2'-O-methylguanosine-3'-phosphate
  modified_base 6: mod_base = OTHER; note = 2'-O-methylcytidine-3'-phosphate
  modified_base 7: mod_base = OTHER; note = Adenosine-glycol nucleic acid (GNA), S-isomer
  modified_base 8: mod_base = OTHER; note = 2'-O-methylguanosine-3'-phosphate
  modified_base 9: mod_base = OTHER; note = 2'-O-methylcytidine-3'-phosphate
  modified_base 10: mod_base = OTHER; note = 2'-O-methyluridine-3'-phosphate
  modified_base 11: mod_base = OTHER; note = 2'-O-methylcytidine-3'-phosphate
  modified_base 12: mod_base = OTHER; note = 2'-O-methyladenosine-3'-phosphate
  modified_base 13: mod_base = OTHER; note = 2'-O-methyladenosine-3'-phosphate
  modified_base 14: mod_base = OTHER; note = 2'-deoxy-2'-fluorocytidine-3'-phosphate
  modified_base 15: mod_base = OTHER; note = 2'-O-methyluridine-3'-phosphate
  modified_base 16: mod_base = OTHER; note = 2'-deoxy-2'-fluoroguanosine-3'-phosphate
  modified_base 17: mod_base = OTHER; note = 2'-O-methyladenosine-3'-phosphate
  modified_base 18: mod_base = OTHER; note = 2'-O-methyladenosine-3'-phosphate
  modified_base 19: mod_base = OTHER; note = 2'-O-methyladenosine-3'-phosphate
  modified_base 20: mod_base = OTHER; note = 2'-O-methylguanosine-3'-phosphate
  modified_base 21: mod_base = OTHER; note = 2'-O-methylcytidine-3'-phosphorothioate
  modified_base 22: mod_base = OTHER; note = 2'-O-methylcytidine-3'-phosphorothioate
  modified_base 23: mod_base = OTHER; note = 2'-O-methylguanosine
  misc_feature 1..4: note = RNA
  misc_feature 6..23: note = RNA
  misc_feature 5: note = DNA
ttggtcagctcaactgaaagccg

SEQ ID NO: 1212 - DNA, 23 bp, synthetic construct
  source 1..23: mol_type = other DNA
  modified_base 1: mod_base = OTHER; note = 2'-O-methyluridine-3'-phosphate 5'-(E)-Vinylphosphonate
  modified_base 3: mod_base = OTHER; note = 2'-O-methylcytidine-3'-phosphate
  modified_base 4: mod_base = OTHER; note = 2'-O-methyladenosine-3'-phosphate
  modified_base 6: mod_base = OTHER; note = 2'-O-methylcytidine-3'-phosphate
  modified_base 8: mod_base = OTHER; note = 2'-O-methyladenosine-3'-phosphate
  modified_base 9: mod_base = OTHER; note = 2'-O-methyluridine-3'-phosphate
  modified_base 10: mod_base = OTHER; note = 2'-O-methyladenosine-3'-phosphate
  modified_base 11: mod_base = OTHER; note = 2'-O-methyluridine-3'-phosphate
  modified_base 13: mod_base = OTHER; note = 2'-O-methyladenosine-3'-phosphate
  modified_base 14: mod_base = OTHER; note = 2'-deoxy-2'-fluoroadenosine-3'-phosphate
  modified_base 15: mod_base = OTHER; note = 2'-O-methylguanosine-3'-phosphate
  modified_base 16: mod_base = OTHER; note = 2'-O-methyluridine-3'-phosphate
  modified_base 17: mod_base = OTHER; note = 2'-O-methylcytidine-3'-phosphate
  modified_base 18: mod_base = OTHER; note = 2'-O-methylcytidine-3'-phosphate
  modified_base 19: mod_base = OTHER; note = 2'-O-methyladenosine-3'-phosphate
  modified_base 20: mod_base = OTHER; note = 2'-O-methyladenosine-3'-phosphate
  modified_base 21: mod_base = OTHER; note = 2'-O-methylguanosine-3'-phosphorothioate
  modified_base 22: mod_base = OTHER; note = 2'-O-methyladenosine-3'-phosphorothioate
  modified_base 23: mod_base = OTHER; note = 2'-O-methyluridine
  misc_feature 1: note = RNA
  misc_feature 3..4: note = RNA
  misc_feature 6: note = RNA
  misc_feature 8..11: note = RNA
  misc_feature 13..23: note = RNA
  misc_feature 2: note = DNA
  misc_feature 5: note = DNA
  misc_feature 7: note = DNA
  misc_feature 12: note = DNA
tgcaccaatatcaagtccaagat

SEQ ID NO: 1213 - DNA, 23 bp, synthetic construct
  source 1..23: mol_type = other DNA
  modified_base 1: mod_base = OTHER; note = 2'-O-methyluridine-3'-phosphate 5'-(E)-Vinylphosphonate
  modified_base 2: mod_base = OTHER; note = 2'-deoxy-2'-fluorocytidine-3'-phosphate
  modified_base 3: mod_base = OTHER; note = 2'-O-methyluridine-3'-phosphate
  modified_base 4: mod_base = OTHER; note = 2'-O-methyladenosine-3'-phosphate
  modified_base 6: mod_base = OTHER; note = 2'-O-methylguanosine-3'-phosphate
  modified_base 7: mod_base = OTHER; note = Adenosine-glycol nucleic acid (GNA), S-isomer
  modified_base 8: mod_base = OTHER; note = 2'-O-methyluridine-3'-phosphate
  modified_base 9: mod_base = OTHER; note = 2'-O-methylcytidine-3'-phosphate
  modified_base 10: mod_base = OTHER; note = 2'-O-methyladenosine-3'-phosphate
  modified_base 11: mod_base = OTHER; note = 2'-O-methyluridine-3'-phosphate
  modified_base 12: mod_base = OTHER; note = 2'-O-methylcytidine-3'-phosphate
  modified_base 13: mod_base = OTHER; note = 2'-O-methylcytidine-3'-phosphate
  modified_base 14: mod_base = OTHER; note = 2'-deoxy-2'-fluorouridine-3'-phosphate
  modified_base 15: mod_base = OTHER; note = 2'-O-methylguanosine-3'-phosphate
  modified_base 16: mod_base = OTHER; note = 2'-deoxy-2'-fluoroguanosine-3'-phosphate
  modified_base 17: mod_base = OTHER; note = 2'-O-methylcytidine-3'-phosphate
  modified_base 18: mod_base = OTHER; note = 2'-O-methylguanosine-3'-phosphate
  modified_base 19: mod_base = OTHER; note = 2'-O-methyladenosine-3'-phosphate
  modified_base 20: mod_base = OTHER; note = 2'-O-methyluridine-3'-phosphate
  modified_base 21: mod_base = OTHER; note = 2'-O-methyladenosine-3'-phosphorothioate
  modified_base 22: mod_base = OTHER; note = 2'-O-methyluridine-3'-phosphorothioate
  modified_base 23: mod_base = OTHER; note = 2'-O-methylcytidine
  misc_feature 1..4: note = RNA
  misc_feature 6..23: note = RNA
  misc_feature 5: note = DNA
tctaggatcatcctggcgatatc

SEQ ID NO: 1214 - DNA, 23 bp, synthetic construct
  source 1..23: mol_type = other DNA
  modified_base 1: mod_base = OTHER; note = 2'-O-methyluridine-3'-phosphate 5'-(E)-Vinylphosphonate
  modified_base 2: mod_base = OTHER; note = 2'-deoxy-2'-fluorouridine-3'-phosphate
  modified_base 3: mod_base = OTHER; note = 2'-O-methyladenosine-3'-phosphate
  modified_base 4: mod_base = OTHER; note = 2'-O-methylguanosine-3'-phosphate
  modified_base 6: mod_base = OTHER; note = 2'-O-methylcytidine-3'-phosphate
  modified_base 7: mod_base = OTHER; note = Adenosine-glycol nucleic acid (GNA), S-isomer
  modified_base 8: mod_base = OTHER; note = 2'-O-methylguanosine-3'-phosphate
  modified_base 9: mod_base = OTHER; note = 2'-O-methylcytidine-3'-phosphate
  modified_base 10: mod_base = OTHER; note = 2'-O-methyladenosine-3'-phosphate
  modified_base 11: mod_base = OTHER; note = 2'-O-methylcytidine-3'-phosphate
  modified_base 12: mod_base = OTHER; note = 2'-O-methylcytidine-3'-phosphate
  modified_base 13: mod_base = OTHER; note = 2'-O-methyladenosine-3'-phosphate
  modified_base 14: mod_base = OTHER; note = 2'-deoxy-2'-fluoroguanosine-3'-phosphate
  modified_base 15: mod_base = OTHER; note = 2'-O-methylguanosine-3'-phosphate
  modified_base 16: mod_base = OTHER; note = 2'-deoxy-2'-fluoroguanosine-3'-phosphate
  modified_base 17: mod_base = OTHER; note = 2'-O-methyluridine-3'-phosphate
  modified_base 18: mod_base = OTHER; note = 2'-O-methylguanosine-3'-phosphate
  modified_base 19: mod_base = OTHER; note = 2'-O-methylguanosine-3'-phosphate
  modified_base 20: mod_base = OTHER; note = 2'-O-methyluridine-3'-phosphate
  modified_base 21: mod_base = OTHER; note = 2'-O-methylguanosine-3'-phosphorothioate
  modified_base 22: mod_base = OTHER; note = 2'-O-methylguanosine-3'-phosphorothioate
  modified_base 23: mod_base = OTHER; note = 2'-O-methylcytidine
  misc_feature 1..4: note = RNA
  misc_feature 6..23: note = RNA
  misc_feature 5: note = DNA
ttagtcagcaccagggtggtggc

SEQ ID NO: 1215 - DNA, 23 bp, synthetic construct
  source 1..23: mol_type = other DNA
  modified_base 1: mod_base = OTHER; note = 2'-O-methyluridine-3'-phosphate 5'-(E)-Vinylphosphonate
  modified_base 3: mod_base = OTHER; note = 2'-O-methyluridine-3'-phosphate
  modified_base 4: mod_base = OTHER; note = 2'-O-methylcytidine-3'-phosphate
  modified_base 6: mod_base = OTHER; note = 2'-O-methyladenosine-3'-phosphate
  modified_base 8: mod_base = OTHER; note = 2'-O-methylcytidine-3'-phosphate
  modified_base 9: mod_base = OTHER; note = 2'-O-methylcytidine-3'-phosphate
  modified_base 10: mod_base = OTHER; note = 2'-O-methyladenosine-3'-phosphate
  modified_base 11: mod_base = OTHER; note = 2'-O-methylguanosine-3'-phosphate
  modified_base 13: mod_base = OTHER; note = 2'-O-methylcytidine-3'-phosphate
  modified_base 14: mod_base = OTHER; note = 2'-deoxy-2'-fluorocytidine-3'-phosphate
  modified_base 15: mod_base = OTHER; note = 2'-O-methyladenosine-3'-phosphate
  modified_base 16: mod_base = OTHER; note = 2'-O-methylguanosine-3'-phosphate
  modified_base 17: mod_base = OTHER; note = 2'-O-methylcytidine-3'-phosphate
  modified_base 18: mod_base = OTHER; note = 2'-O-methyluridine-3'-phosphate
  modified_base 19: mod_base = OTHER; note = 2'-O-methylguanosine-3'-phosphate
  modified_base 20: mod_base = OTHER; note = 2'-O-methyladenosine-3'-phosphate
  modified_base 21: mod_base = OTHER; note = 2'-O-methyluridine-3'-phosphorothioate
  modified_base 22: mod_base = OTHER; note = 2'-O-methyluridine-3'-phosphorothioate
  modified_base 23: mod_base = OTHER; note = 2'-O-methylguanosine
  misc_feature 1: note = RNA
  misc_feature 3..4: note = RNA
  misc_feature 6: note = RNA
  misc_feature 8..11: note = RNA
  misc_feature 13..23: note = RNA
  misc_feature 2: note = DNA
  misc_feature 5: note = DNA
  misc_feature 7: note = DNA
  misc_feature 12: note = DNA
tatcaaaccaggccagctgattg

SEQ ID NO: 1216 - DNA, 23 bp, synthetic construct
  source 1..23: mol_type = other DNA
  modified_base 1: mod_base = OTHER; note = 2'-O-methyluridine-3'-phosphate 5'-(E)-Vinylphosphonate
  modified_base 2: mod_base = OTHER; note = 2'-deoxy-2'-fluorouridine-3'-phosphate
  modified_base 3: mod_base = OTHER; note = 2'-O-methyladenosine-3'-phosphate
  modified_base 4: mod_base = OTHER; note = 2'-O-methyluridine-3'-phosphate
  modified_base 6: mod_base = OTHER; note = 2'-O-methyladenosine-3'-phosphate
  modified_base 7: mod_base = OTHER; note = Adenosine-glycol nucleic acid (GNA), S-isomer
  modified_base 8: mod_base = OTHER; note = 2'-O-methyladenosine-3'-phosphate
  modified_base 9: mod_base = OTHER; note = 2'-O-methylcytidine-3'-phosphate
  modified_base 10: mod_base = OTHER; note = 2'-O-methylcytidine-3'-phosphate
  modified_base 11: mod_base = OTHER; note = 2'-O-methyladenosine-3'-phosphate
  modified_base 12: mod_base = OTHER; note = 2'-O-methylguanosine-3'-phosphate
  modified_base 13: mod_base = OTHER; note = 2'-O-methylguanosine-3'-phosphate
  modified_base 14: mod_base = OTHER; note = 2'-deoxy-2'-fluorocytidine-3'-phosphate
  modified_base 15: mod_base = OTHER; note = 2'-O-methylcytidine-3'-phosphate
  modified_base 16: mod_base = OTHER; note = 2'-deoxy-2'-fluoroadenosine-3'-phosphate
  modified_base 17: mod_base = OTHER; note = 2'-O-methylguanosine-3'-phosphate
  modified_base 18: mod_base = OTHER; note = 2'-O-methylcytidine-3'-phosphate
  modified_base 19: mod_base = OTHER; note = 2'-O-methyluridine-3'-phosphate
  modified_base 20: mod_base = OTHER; note = 2'-O-methylguanosine-3'-phosphate
  modified_base 21: mod_base = OTHER; note = 2'-O-methyladenosine-3'-phosphorothioate
  modified_base 22: mod_base = OTHER; note = 2'-O-methyluridine-3'-phosphorothioate
  modified_base 23: mod_base = OTHER; note = 2'-O-methyluridine
  misc_feature 1..4: note = RNA
  misc_feature 6..23: note = RNA
  misc_feature 5: note = DNA
ttatcaaaccaggccagctgatt

SEQ ID NO: 1217 - DNA, 23 bp, synthetic construct
  source 1..23: mol_type = other DNA
  modified_base 1: mod_base = OTHER; note = 2'-O-methyluridine-3'-phosphate 5'-(E)-Vinylphosphonate
  modified_base 3: mod_base = OTHER; note = 2'-O-methyladenosine-3'-phosphate
  modified_base 4: mod_base = OTHER; note = 2'-O-methyluridine-3'-phosphate
  modified_base 6: mod_base = OTHER; note = 2'-O-methyladenosine-3'-phosphate
  modified_base 8: mod_base = OTHER; note = 2'-O-methyladenosine-3'-phosphate
  modified_base 9: mod_base = OTHER; note = 2'-O-methylcytidine-3'-phosphate
  modified_base 10: mod_base = OTHER; note = 2'-O-methylcytidine-3'-phosphate
  modified_base 11: mod_base = OTHER; note = 2'-O-methyladenosine-3'-phosphate
  modified_base 13: mod_base = OTHER; note = 2'-O-methylguanosine-3'-phosphate
  modified_base 14: mod_base = OTHER; note = 2'-deoxy-2'-fluorocytidine-3'-phosphate
  modified_base 15: mod_base = OTHER; note = 2'-O-methylcytidine-3'-phosphate
  modified_base 16: mod_base = OTHER; note = 2'-O-methyladenosine-3'-phosphate
  modified_base 17: mod_base = OTHER; note = 2'-O-methylguanosine-3'-phosphate
  modified_base 18: mod_base = OTHER; note = 2'-O-methylcytidine-3'-phosphate
  modified_base 19: mod_base = OTHER; note = 2'-O-methyluridine-3'-phosphate
  modified_base 20: mod_base = OTHER; note = 2'-O-methylguanosine-3'-phosphate
  modified_base 21: mod_base = OTHER; note = 2'-O-methyladenosine-3'-phosphorothioate
  modified_base 22: mod_base = OTHER; note = 2'-O-methyluridine-3'-phosphorothioate
  modified_base 23: mod_base = OTHER; note = 2'-O-methyluridine
  misc_feature 1: note = RNA
  misc_feature 3..4: note = RNA
  misc_feature 6: note = RNA
  misc_feature 8..11: note = RNA
  misc_feature 13..23: note = RNA
  misc_feature 2: note = DNA
  misc_feature 5: note = DNA
  misc_feature 7: note = DNA
  misc_feature 12: note = DNA
ttatcaaaccaggccagctgatt

SEQ ID NO: 1218 - DNA, 23 bp, synthetic construct
  source 1..23: mol_type = other DNA
  modified_base 1: mod_base = OTHER; note = 2'-O-methyluridine-3'-phosphate 5'-(E)-Vinylphosphonate
  modified_base 2: mod_base = OTHER; note = 2'-deoxy-2'-fluorouridine-3'-phosphate
  modified_base 3: mod_base = OTHER; note = 2'-O-methylcytidine-3'-phosphate
  modified_base 4: mod_base = OTHER; note = 2'-O-methyladenosine-3'-phosphate
  modified_base 6: mod_base = OTHER; note = 2'-O-methyluridine-3'-phosphate
  modified_base 7: mod_base = OTHER; note = Adenosine-glycol nucleic acid (GNA), S-isomer
  modified_base 8: mod_base = OTHER; note = 2'-O-methyluridine-3'-phosphate
  modified_base 9: mod_base = OTHER; note = 2'-O-methylcytidine-3'-phosphate
  modified_base 10: mod_base = OTHER; note = 2'-O-methyladenosine-3'-phosphate
  modified_base 11: mod_base = OTHER; note = 2'-O-methyladenosine-3'-phosphate
  modified_base 12: mod_base = OTHER; note = 2'-O-methyladenosine-3'-phosphate
  modified_base 13: mod_base = OTHER; note = 2'-O-methylcytidine-3'-phosphate
  modified_base 14: mod_base = OTHER; note = 2'-deoxy-2'-fluorocytidine-3'-phosphate
  modified_base 15: mod_base = OTHER; note = 2'-O-methyladenosine-3'-phosphate
  modified_base 16: mod_base = OTHER; note = 2'-deoxy-2'-fluoroguanosine-3'-phosphate
  modified_base 17: mod_base = OTHER; note = 2'-O-methylguanosine-3'-phosphate
  modified_base 18: mod_base = OTHER; note = 2'-O-methylcytidine-3'-phosphate
  modified_base 19: mod_base = OTHER; note = 2'-O-methylcytidine-3'-phosphate
  modified_base 20: mod_base = OTHER; note = 2'-O-methyladenosine-3'-phosphate
  modified_base 21: mod_base = OTHER; note = 2'-O-methylguanosine-3'-phosphorothioate
  modified_base 22: mod_base = OTHER; note = 2'-O-methylcytidine-3'-phosphorothioate
  modified_base 23: mod_base = OTHER; note = 2'-O-methyluridine
  misc_feature 1..4: note = RNA
  misc_feature 6..23: note = RNA
  misc_feature 5: note = DNA
ttcagtatcaaaccaggccagct

SEQ ID NO: 1219 - DNA, 23 bp, synthetic construct
  source 1..23: mol_type = other DNA
  modified_base 1: mod_base = OTHER; note = 2'-O-methyluridine-3'-phosphate 5'-(E)-Vinylphosphonate
  modified_base 3: mod_base = OTHER; note = 2'-O-methylcytidine-3'-phosphate
  modified_base 4: mod_base = OTHER; note = 2'-O-methylcytidine-3'-phosphate
  modified_base 6: mod_base = OTHER; note = 2'-O-methyladenosine-3'-phosphate
  modified_base 8: mod_base = OTHER; note = 2'-O-methyladenosine-3'-phosphate
  modified_base 9: mod_base = OTHER; note = 2'-O-methylguanosine-3'-phosphate
  modified_base 10: mod_base = OTHER; note = 2'-O-methylguanosine-3'-phosphate
  modified_base 11: mod_base = OTHER; note = 2'-O-methyladenosine-3'-phosphate
  modified_base 13: mod_base = OTHER; note = 2'-O-methylguanosine-3'-phosphate
  modified_base 14: mod_base = OTHER; note = 2'-deoxy-2'-fluoroadenosine-3'-phosphate
  modified_base 15: mod_base = OTHER; note = 2'-O-methyluridine-3'-phosphate
  modified_base 16: mod_base = OTHER; note = 2'-O-methyluridine-3'-phosphate
  modified_base 17: mod_base = OTHER; note = 2'-O-methyluridine-3'-phosphate
  modified_base 18: mod_base = OTHER; note = 2'-O-methyladenosine-3'-phosphate
  modified_base 19: mod_base = OTHER; note = 2'-O-methylcytidine-3'-phosphate
  modified_base 20: mod_base = OTHER; note = 2'-O-methyladenosine-3'-phosphate
  modified_base 21: mod_base = OTHER; note = 2'-O-methylguanosine-3'-phosphorothioate
  modified_base 22: mod_base = OTHER; note = 2'-O-methylguanosine-3'-phosphorothioate
  modified_base 23: mod_base = OTHER; note = 2'-O-methyluridine
  misc_feature 1: note = RNA
  misc_feature 3..4: note = RNA
  misc_feature 6: note = RNA
  misc_feature 8..11: note = RNA
  misc_feature 13..23: note = RNA
  misc_feature 2: note = DNA
  misc_feature 5: note = DNA
  misc_feature 7: note = DNA
  misc_feature 12: note = DNA
tacctaaaggatgatttacaggt

SEQ ID NO: 1220 - DNA, 23 bp, synthetic construct
  source 1..23: mol_type = other DNA
  modified_base 1: mod_base = OTHER; note = 2'-O-methyluridine-3'-phosphate 5'-(E)-Vinylphosphonate
  modified_base 3: mod_base = OTHER; note = 2'-O-methyladenosine-3'-phosphate
  modified_base 4: mod_base = OTHER; note = 2'-O-methylcytidine-3'-phosphate
  modified_base 6: mod_base = OTHER; note = 2'-O-methyluridine-3'-phosphate
  modified_base 8: mod_base = OTHER; note = 2'-O-methyladenosine-3'-phosphate
  modified_base 9: mod_base = OTHER; note = 2'-O-methyladenosine-3'-phosphate
  modified_base 10: mod_base = OTHER; note = 2'-O-methylguanosine-3'-phosphate
  modified_base 11: mod_base = OTHER; note = 2'-O-methylguanosine-3'-phosphate
  modified_base 13: mod_base = OTHER; note = 2'-O-methyluridine-3'-phosphate
  modified_base 14: mod_base = OTHER; note = 2'-deoxy-2'-fluoroguanosine-3'-phosphate
  modified_base 15: mod_base = OTHER; note = 2'-O-methyladenosine-3'-phosphate
  modified_base 16: mod_base = OTHER; note = 2'-O-methyluridine-3'-phosphate
  modified_base 17: mod_base = OTHER; note = 2'-O-methyluridine-3'-phosphate
  modified_base 18: mod_base = OTHER; note = 2'-O-methyluridine-3'-phosphate
  modified_base 19: mod_base = OTHER; note = 2'-O-methyladenosine-3'-phosphate
  modified_base 20: mod_base = OTHER; note = 2'-O-methylcytidine-3'-phosphate
  modified_base 21: mod_base = OTHER; note = 2'-O-methyladenosine-3'-phosphorothioate
  modified_base 22: mod_base = OTHER; note = 2'-O-methylguanosine-3'-phosphorothioate
  modified_base 23: mod_base = OTHER; note = 2'-O-methylguanosine
  misc_feature 1: note = RNA
  misc_feature 3..4: note = RNA
  misc_feature 6: note = RNA
  misc_feature 8..11: note = RNA
  misc_feature 13..23: note = RNA
  misc_feature 2: note = DNA
  misc_feature 5: note = DNA
  misc_feature 7: note = DNA
  misc_feature 12: note = DNA
ttacctaaaggatgatttacagg

SEQ ID NO: 1221 - DNA, 23 bp, synthetic construct
  source 1..23: mol_type = other DNA
  modified_base 1: mod_base = OTHER; note = 2'-O-methyluridine-3'-phosphate 5'-(E)-Vinylphosphonate
  modified_base 3: mod_base = OTHER; note = 2'-O-methylcytidine-3'-phosphate
  modified_base 4: mod_base = OTHER; note = 2'-O-methylcytidine-3'-phosphate
  modified_base 6: mod_base = OTHER; note = 2'-O-methyluridine-3'-phosphate
  modified_base 8: mod_base = OTHER; note = 2'-O-methylcytidine-3'-phosphate
  modified_base 9: mod_base = OTHER; note = 2'-O-methylcytidine-3'-phosphate
  modified_base 10: mod_base = OTHER; note = 2'-O-methyladenosine-3'-phosphate
  modified_base 11: mod_base = OTHER; note = 2'-O-methyladenosine-3'-phosphate
  modified_base 13: mod_base = OTHER; note = 2'-O-methylcytidine-3'-phosphate
  modified_base 14: mod_base = OTHER; note = 2'-deoxy-2'-fluoroadenosine-3'-phosphate
  modified_base 15: mod_base = OTHER; note = 2'-O-methyladenosine-3'-phosphate
  modified_base 16: mod_base = OTHER; note = 2'-O-methylguanosine-3'-phosphate
  modified_base 17: mod_base = OTHER; note = 2'-O-methyluridine-3'-phosphate
  modified_base 18: mod_base = OTHER; note = 2'-O-methylcytidine-3'-phosphate
  modified_base 19: mod_base = OTHER; note = 2'-O-methyluridine-3'-phosphate
  modified_base 20: mod_base = OTHER; note = 2'-O-methyluridine-3'-phosphate
  modified_base 21: mod_base = OTHER; note = 2'-O-methyluridine-3'-phosphorothioate
  modified_base 22: mod_base = OTHER; note = 2'-O-methylcytidine-3'-phosphorothioate
  modified_base 23: mod_base = OTHER; note = 2'-O-methyluridine
  misc_feature 1: note = RNA
  misc_feature 3..4: note = RNA
  misc_feature 6: note = RNA
  misc_feature 8..11: note = RNA
  misc_feature 13..23: note = RNA
  misc_feature 2: note = DNA
  misc_feature 5: note = DNA
  misc_feature 7: note = DNA
  misc_feature 12: note = DNA
taccctaccaaccaagtctttct

SEQ ID NO: 1222 - DNA, 23 bp, synthetic construct
  source 1..23: mol_type = other DNA
  modified_base 1: mod_base = OTHER; note = 2'-O-methyluridine-3'-phosphate 5'-(E)-Vinylphosphonate
  modified_base 2: mod_base = OTHER; note = 2'-deoxy-2'-fluoroadenosine-3'-phosphate
  modified_base 3: mod_base = OTHER; note = 2'-O-methyladenosine-3'-phosphate
  modified_base 4: mod_base = OTHER; note = 2'-O-methylguanosine-3'-phosphate
  modified_base 6: mod_base = OTHER; note = 2'-O-methylcytidine-3'-phosphate
  modified_base 7: mod_base = OTHER; note = Adenosine-glycol nucleic acid (GNA), S-isomer
  modified_base 8: mod_base = OTHER; note = 2'-O-methyluridine-3'-phosphate
  modified_base 9: mod_base = OTHER; note = 2'-O-methylcytidine-3'-phosphate
  modified_base 10: mod_base = OTHER; note = 2'-O-methyluridine-3'-phosphate
  modified_base 11: mod_base = OTHER; note = 2'-O-methylcytidine-3'-phosphate
  modified_base 12: mod_base = OTHER; note = 2'-O-methylcytidine-3'-phosphate
  modified_base 13: mod_base = OTHER; note = 2'-O-methyluridine-3'-phosphate
  modified_base 14: mod_base = OTHER; note = 2'-deoxy-2'-fluorouridine-3'-phosphate
  modified_base 15: mod_base = OTHER; note = 2'-O-methyluridine-3'-phosphate
  modified_base 16: mod_base = OTHER; note = 2'-deoxy-2'-fluorocytidine-3'-phosphate
  modified_base 17: mod_base = OTHER; note = 2'-O-methyladenosine-3'-phosphate
  modified_base 18: mod_base = OTHER; note = 2'-O-methyladenosine-3'-phosphate
  modified_base 19: mod_base = OTHER; note = 2'-O-methyladenosine-3'-phosphate
  modified_base 20: mod_base = OTHER; note = 2'-O-methylguanosine-3'-phosphate
  modified_base 21: mod_base = OTHER; note = 2'-O-methyluridine-3'-phosphorothioate
  modified_base 22: mod_base = OTHER; note = 2'-O-methyladenosine-3'-phosphorothioate
  modified_base 23: mod_base = OTHER; note = 2'-O-methyluridine
  misc_feature 1..4: note = RNA
  misc_feature 6..23: note = RNA
  misc_feature 5: note = DNA
taagacatctcctttcaaagtat

SEQ ID NO: 1223 - DNA, 23 bp, synthetic construct
  source 1..23: mol_type = other DNA
  modified_base 1: mod_base = OTHER; note = 2'-O-methyluridine-3'-phosphate 5'-(E)-Vinylphosphonate
  modified_base 3: mod_base = OTHER; note = 2'-O-methyladenosine-3'-phosphate
  modified_base 4: mod_base = OTHER; note = 2'-O-methylguanosine-3'-phosphate
  modified_base 6: mod_base = OTHER; note = 2'-O-methylcytidine-3'-phosphate
  modified_base 8: mod_base = OTHER; note = 2'-O-methyluridine-3'-phosphate
  modified_base 9: mod_base = OTHER; note = 2'-O-methylcytidine-3'-phosphate
  modified_base 10: mod_base = OTHER; note = 2'-O-methyluridine-3'-phosphate
  modified_base 11: mod_base = OTHER; note = 2'-O-methylcytidine-3'-phosphate
  modified_base 13: mod_base = OTHER; note = 2'-O-methyluridine-3'-phosphate
  modified_base 14: mod_base = OTHER; note = 2'-deoxy-2'-fluorouridine-3'-phosphate
  modified_base 15: mod_base = OTHER; note = 2'-O-methyluridine-3'-phosphate
  modified_base 16: mod_base = OTHER; note = 2'-O-methylcytidine-3'-phosphate
  modified_base 17: mod_base = OTHER; note = 2'-O-methyladenosine-3'-phosphate
  modified_base 18: mod_base = OTHER; note = 2'-O-methyladenosine-3'-phosphate
  modified_base 19: mod_base = OTHER; note = 2'-O-methyladenosine-3'-phosphate
  modified_base 20: mod_base = OTHER; note = 2'-O-methylguanosine-3'-phosphate
  modified_base 21: mod_base = OTHER; note = 2'-O-methyluridine-3'-phosphorothioate
  modified_base 22: mod_base = OTHER; note = 2'-O-methyladenosine-3'-phosphorothioate
  modified_base 23: mod_base = OTHER; note = 2'-O-methyluridine
  misc_feature 1: note = RNA
  misc_feature 3..4: note = RNA
  misc_feature 6: note = RNA
  misc_feature 8..11: note = RNA
  misc_feature 13..23: note = RNA
  misc_feature 2: note = DNA
  misc_feature 5: note = DNA
  misc_feature 7: note = DNA
  misc_feature 12: note = DNA
taagacatctcctttcaaagtat

SEQ ID NO: 1224 - DNA, 23 bp, synthetic construct
  source 1..23: mol_type = other DNA
  modified_base 1: mod_base = OTHER; note = 2'-O-methyluridine-3'-phosphate 5'-(E)-Vinylphosphonate
  modified_base 3: mod_base = OTHER; note = 2'-O-methyladenosine-3'-phosphate
  modified_base 4: mod_base = OTHER; note = 2'-O-methylcytidine-3'-phosphate
  modified_base 6: mod_base = OTHER; note = 2'-O-methyladenosine-3'-phosphate
  modified_base 8: mod_base = OTHER; note = 2'-O-methylcytidine-3'-phosphate
  modified_base 9: mod_base = OTHER; note = 2'-O-methyladenosine-3'-phosphate
  modified_base 10: mod_base = OTHER; note = 2'-O-methylguanosine-3'-phosphate
  modified_base 11: mod_base = OTHER; note = 2'-O-methyladenosine-3'-phosphate
  modified_base 13: mod_base = OTHER; note = 2'-O-methyladenosine-3'-phosphate
  modified_base 14: mod_base = OTHER; note = 2'-deoxy-2'-fluorouridine-3'-phosphate
  modified_base 15: mod_base = OTHER; note = 2'-O-methylcytidine-3'-phosphate
  modified_base 16: mod_base = OTHER; note = 2'-O-methyluridine-3'-phosphate
  modified_base 17: mod_base = OTHER; note = 2'-O-methylguanosine-3'-phosphate
  modified_base 18: mod_base = OTHER; note = 2'-O-methyladenosine-3'-phosphate
  modified_base 19: mod_base = OTHER; note = 2'-O-methylguanosine-3'-phosphate
  modified_base 20: mod_base = OTHER; note = 2'-O-methyladenosine-3'-phosphate
  modified_base 21: mod_base = OTHER; note = 2'-O-methyladenosine-3'-phosphorothioate
  modified_base 22: mod_base = OTHER; note = 2'-O-methylcytidine-3'-phosphorothioate
  modified_base 23: mod_base = OTHER; note = 2'-O-methyladenosine
  misc_feature 1: note = RNA
  misc_feature 3..4: note = RNA
  misc_feature 6: note = RNA
  misc_feature 8..11: note = RNA
  misc_feature 13..23: note = RNA
  misc_feature 2: note = DNA
  misc_feature 5: note = DNA
  misc_feature 7: note = DNA
  misc_feature 12: note = DNA
taacaaccagaaatctgagaaca

SEQ ID NO: 1225 - DNA, 23 bp, synthetic construct
  source 1..23: mol_type = other DNA
  modified_base 1: mod_base = OTHER; note = 2'-O-methyluridine-3'-phosphate 5'-(E)-Vinylphosphonate
  modified_base 2: mod_base = OTHER; note = 2'-deoxy-2'-fluorouridine-3'-phosphate
  modified_base 3: mod_base = OTHER; note = 2'-O-methyladenosine-3'-phosphate
  modified_base 4: mod_base = OTHER; note = 2'-O-methyladenosine-3'-phosphate
  modified_base 6: mod_base = OTHER; note = 2'-O-methyladenosine-3'-phosphate
  modified_base 7: mod_base = OTHER; note = Adenosine-glycol nucleic acid (GNA), S-isomer
  modified_base 8: mod_base = OTHER; note = 2'-O-methylcytidine-3'-phosphate
  modified_base 9: mod_base = OTHER; note = 2'-O-methylcytidine-3'-phosphate
  modified_base 10: mod_base = OTHER; note = 2'-O-methyladenosine-3'-phosphate
  modified_base 11: mod_base = OTHER; note = 2'-O-methylguanosine-3'-phosphate
  modified_base 12: mod_base = OTHER; note = 2'-O-methyladenosine-3'-phosphate
  modified_base 13: mod_base = OTHER; note = 2'-O-methyladenosine-3'-phosphate
  modified_base 14: mod_base = OTHER; note = 2'-deoxy-2'-fluoroadenosine-3'-phosphate
  modified_base 15: mod_base = OTHER; note = 2'-O-methyluridine-3'-phosphate
  modified_base 16: mod_base = OTHER; note = 2'-deoxy-2'-fluorocytidine-3'-phosphate
  modified_base 17: mod_base = OTHER; note = 2'-O-methyluridine-3'-phosphate
  modified_base 18: mod_base = OTHER; note = 2'-O-methylguanosine-3'-phosphate
  modified_base 19: mod_base = OTHER; note = 2'-O-methyladenosine-3'-phosphate
  modified_base 20: mod_base = OTHER; note = 2'-O-methylguanosine-3'-phosphate
  modified_base 21: mod_base = OTHER; note = 2'-O-methyladenosine-3'-phosphorothioate
  modified_base 22: mod_base = OTHER; note = 2'-O-methyladenosine-3'-phosphorothioate
  modified_base 23: mod_base = OTHER; note = 2'-O-methylcytidine
  misc_feature 1..4: note = RNA
  misc_feature 6..23: note = RNA
  misc_feature 5: note = DNA
ttaacaaccagaaatctgagaac

SEQ ID NO: 1226 - DNA, 23 bp, synthetic construct
  source 1..23: mol_type = other DNA
  modified_base 1: mod_base = OTHER; note = 2'-O-methyluridine-3'-phosphate 5'-(E)-Vinylphosphonate
  modified_base 3: mod_base = OTHER; note = 2'-O-methyladenosine-3'-phosphate
  modified_base 4: mod_base = OTHER; note = 2'-O-methyladenosine-3'-phosphate
  modified_base 6: mod_base = OTHER; note = 2'-O-methyladenosine-3'-phosphate
  modified_base 8: mod_base = OTHER; note = 2'-O-methylcytidine-3'-phosphate
  modified_base 9: mod_base = OTHER; note = 2'-O-methylcytidine-3'-phosphate
  modified_base 10: mod_base = OTHER; note = 2'-O-methyladenosine-3'-phosphate
  modified_base 11: mod_base = OTHER; note = 2'-O-methylguanosine-3'-phosphate
  modified_base 13: mod_base = OTHER; note = 2'-O-methyladenosine-3'-phosphate
  modified_base 14: mod_base = OTHER; note = 2'-deoxy-2'-fluoroadenosine-3'-phosphate
  modified_base 15: mod_base = OTHER; note = 2'-O-methyluridine-3'-phosphate
  modified_base 16: mod_base = OTHER; note = 2'-O-methylcytidine-3'-phosphate
  modified_base 17: mod_base = OTHER; note = 2'-O-methyluridine-3'-phosphate
  modified_base 18: mod_base = OTHER; note = 2'-O-methylguanosine-3'-phosphate
  modified_base 19: mod_base = OTHER; note = 2'-O-methyladenosine-3'-phosphate
  modified_base 20: mod_base = OTHER; note = 2'-O-methylguanosine-3'-phosphate
  modified_base 21: mod_base = OTHER; note = 2'-O-methyladenosine-3'-phosphorothioate
  modified_base 22: mod_base = OTHER; note = 2'-O-methyladenosine-3'-phosphorothioate
  modified_base 23: mod_base = OTHER; note = 2'-O-methylcytidine
  misc_feature 1: note = RNA
  misc_feature 3..4: note = RNA
  misc_feature 6: note = RNA
  misc_feature 8..11: note = RNA
  misc_feature 13..23: note = RNA
  misc_feature 2: note = DNA
  misc_feature 5: note = DNA
  misc_feature 7: note = DNA
  misc_feature 12: note = DNA
ttaacaaccagaaatctgagaac

SEQ ID NO: 1227 - DNA, 23 bp, synthetic construct
  source 1..23: mol_type = other DNA
  modified_base 1: mod_base = OTHER; note = 2'-O-methyluridine-3'-phosphate 5'-(E)-Vinylphosphonate
  modified_base 3: mod_base = OTHER; note = 2'-O-methyluridine-3'-phosphate
  modified_base 4: mod_base = OTHER; note = 2'-O-methyladenosine-3'-phosphate
  modified_base 6: mod_base = OTHER; note = 2'-O-methylcytidine-3'-phosphate
  modified_base 8: mod_base = OTHER; note = 2'-O-methyladenosine-3'-phosphate
  modified_base 9: mod_base = OTHER; note = 2'-O-methylcytidine-3'-phosphate
  modified_base 10: mod_base = OTHER; note = 2'-O-methylcytidine-3'-phosphate
  modified_base 11: mod_base = OTHER; note = 2'-O-methyladenosine-3'-phosphate
  modified_base 13: mod_base = OTHER; note = 2'-O-methyladenosine-3'-phosphate
  modified_base 14: mod_base = OTHER; note = 2'-deoxy-2'-fluoroadenosine-3'-phosphate
  modified_base 15: mod_base = OTHER; note = 2'-O-methyladenosine-3'-phosphate
  modified_base 16: mod_base = OTHER; note = 2'-O-methyluridine-3'-phosphate
  modified_base 17: mod_base = OTHER; note = 2'-O-methylcytidine-3'-phosphate
  modified_base 18: mod_base = OTHER; note = 2'-O-methyluridine-3'-phosphate
  modified_base 19: mod_base = OTHER; note = 2'-O-methylguanosine-3'-phosphate
  modified_base 20: mod_base = OTHER; note = 2'-O-methyladenosine-3'-phosphate
  modified_base 21: mod_base = OTHER; note = 2'-O-methylguanosine-3'-phosphorothioate
  modified_base 22: mod_base = OTHER; note = 2'-O-methyladenosine-3'-phosphorothioate
  modified_base 23: mod_base = OTHER; note = 2'-O-methyladenosine
  misc_feature 1: note = RNA
  misc_feature 3..4: note = RNA
  misc_feature 6: note = RNA
  misc_feature 8..11: note = RNA
  misc_feature 13..23: note = RNA
  misc_feature 2: note = DNA
  misc_feature 5: note = DNA
  misc_feature 7: note = DNA
  misc_feature 12: note = DNA
tataacaaccagaaatctgagaa

SEQ ID NO: 1228 - DNA, 23 bp, synthetic construct
  source 1..23: mol_type = other DNA
  modified_base 1: mod_base = OTHER; note = 2'-O-methyluridine-3'-phosphate 5'-(E)-Vinylphosphonate
  modified_base 3: mod_base = OTHER; note = 2'-O-methylcytidine-3'-phosphate
  modified_base 4: mod_base = OTHER; note = 2'-O-methyladenosine-3'-phosphate
  modified_base 6: mod_base = OTHER; note = 2'-O-methyladenosine-3'-phosphate
  modified_base 8: mod_base = OTHER; note = 2'-O-methylguanosine-3'-phosphate
  modified_base 9: mod_base = OTHER; note = 2'-O-methyladenosine-3'-phosphate
  modified_base 10: mod_base = OTHER; note = 2'-O-methyluridine-3'-phosphate
  modified_base 11: mod_base = OTHER; note = 2'-O-methylcytidine-3'-phosphate
  modified_base 13: mod_base = OTHER; note = 2'-O-methylcytidine-3'-phosphate
  modified_base 14: mod_base = OTHER; note = 2'-deoxy-2'-fluoroadenosine-3'-phosphate
  modified_base 15: mod_base = OTHER; note = 2'-O-methyluridine-3'-phosphate
  modified_base 16: mod_base = OTHER; note = 2'-O-methyladenosine-3'-phosphate
  modified_base 17: mod_base = OTHER; note = 2'-O-methyladenosine-3'-phosphate
  modified_base 18: mod_base = OTHER; note = 2'-O-methylcytidine-3'-phosphate
  modified_base 19: mod_base = OTHER; note = 2'-O-methyladenosine-3'-phosphate
  modified_base 20: mod_base = OTHER; note = 2'-O-methyladenosine-3'-phosphate
  modified_base 21: mod_base = OTHER; note = 2'-O-methylcytidine-3'-phosphorothioate
  modified_base 22: mod_base = OTHER; note = 2'-O-methylcytidine-3'-phosphorothioate
  modified_base 23: mod_base = OTHER; note = 2'-O-methyladenosine
  misc_feature 1: note = RNA
  misc_feature 3..4: note = RNA
  misc_feature 6: note = RNA
  misc_feature 8..11: note = RNA
  misc_feature 13..23: note = RNA
  misc_feature 2: note = DNA
  misc_feature 5: note = DNA
  misc_feature 7: note = DNA
  misc_feature 12: note = DNA
tacacatgatcacataacaacca

SEQ ID NO: 1229 - DNA, 23 bp, synthetic construct
  source 1..23: mol_type = other DNA
  modified_base 1: mod_base = OTHER; note = 2'-O-methyluridine-3'-phosphate 5'-(E)-Vinylphosphonate
  modified_base 3: mod_base = OTHER; note = 2'-O-methyladenosine-3'-phosphate
  modified_base 4: mod_base = OTHER; note = 2'-O-methylcytidine-3'-phosphate
  modified_base 6: mod_base = OTHER; note = 2'-O-methylcytidine-3'-phosphate
  modified_base 8: mod_base = OTHER; note = 2'-O-methyluridine-3'-phosphate
  modified_base 9: mod_base = OTHER; note = 2'-O-methylguanosine-3'-phosphate
  modified_base 10: mod_base = OTHER; note = 2'-O-methyladenosine-3'-phosphate
  modified_base 11: mod_base = OTHER; note = 2'-O-methyluridine-3'-phosphate
  modified_base 13: mod_base = OTHER; note = 2'-O-methyladenosine-3'-phosphate
  modified_base 14: mod_base = OTHER; note = 2'-deoxy-2'-fluorocytidine-3'-phosphate
  modified_base 15: mod_base = OTHER; note = 2'-O-methyladenosine-3'-phosphate
  modified_base 16: mod_base = OTHER; note = 2'-O-methyluridine-3'-phosphate
  modified_base 17: mod_base = OTHER; note = 2'-O-methyladenosine-3'-phosphate
  modified_base 18: mod_base = OTHER; note = 2'-O-methyladenosine-3'-phosphate
  modified_base 19: mod_base = OTHER; note = 2'-O-methylcytidine-3'-phosphate
  modified_base 20: mod_base = OTHER; note = 2'-O-methyladenosine-3'-phosphate
  modified_base 21: mod_base = OTHER; note = 2'-O-methyladenosine-3'-phosphorothioate
  modified_base 22: mod_base = OTHER; note = 2'-O-methylcytidine-3'-phosphorothioate
  modified_base 23: mod_base = OTHER; note = 2'-O-methylcytidine
  misc_feature 1: note = RNA
  misc_feature 3..4: note = RNA
  misc_feature 6: note = RNA
  misc_feature 8..11: note = RNA
  misc_feature 13..23: note = RNA
  misc_feature 2: note = DNA
  misc_feature 5: note = DNA
  misc_feature 7: note = DNA
  misc_feature 12: note = DNA
tcacacatgatcacataacaacc

SEQ ID NO: 1230 - DNA, 23 bp, synthetic construct
  source 1..23: mol_type = other DNA
  modified_base 1: mod_base = OTHER; note = 2'-O-methyluridine-3'-phosphate 5'-(E)-Vinylphosphonate
  modified_base 2: mod_base = OTHER; note = 2'-deoxy-2'-fluorouridine-3'-phosphate
  modified_base 3: mod_base = OTHER; note = 2'-O-methyladenosine-3'-phosphate
  modified_base 4: mod_base = OTHER; note = 2'-O-methyladenosine-3'-phosphate
  modified_base 6: mod_base = OTHER; note = 2'-O-methyluridine-3'-phosphate
  modified_base 7: mod_base = OTHER; note = Thymidine-glycol nucleic acid (GNA), S-Isomer
  modified_base 8: mod_base = OTHER; note = 2'-O-methylcytidine-3'-phosphate
  modified_base 9: mod_base = OTHER; note = 2'-O-methylcytidine-3'-phosphate
  modified_base 10: mod_base = OTHER; note = 2'-O-methyladenosine-3'-phosphate
  modified_base 11: mod_base = OTHER; note = 2'-O-methylcytidine-3'-phosphate
  modified_base 12: mod_base = OTHER; note = 2'-O-methyladenosine-3'-phosphate
  modified_base 13: mod_base = OTHER; note = 2'-O-methylcytidine-3'-phosphate
  modified_base 14: mod_base = OTHER; note = 2'-deoxy-2'-fluoroadenosine-3'-phosphate
  modified_base 15: mod_base = OTHER; note = 2'-O-methyluridine-3'-phosphate
  modified_base 16: mod_base = OTHER; note = 2'-deoxy-2'-fluoroguanosine-3'-phosphate
  modified_base 17: mod_base = OTHER; note = 2'-O-methyladenosine-3'-phosphate
  modified_base 18: mod_base = OTHER; note = 2'-O-methyluridine-3'-phosphate
  modified_base 19: mod_base = OTHER; note = 2'-O-methylcytidine-3'-phosphate
  modified_base 20: mod_base = OTHER; note = 2'-O-methyladenosine-3'-phosphate
  modified_base 21: mod_base = OTHER; note = 2'-O-methylcytidine-3'-phosphorothioate
  modified_base 22: mod_base = OTHER; note = 2'-O-methyladenosine-3'-phosphorothioate
  modified_base 23: mod_base = OTHER; note = 2'-O-methyluridine
  misc_feature 1..4: note = RNA
  misc_feature 6..23: note = RNA
  misc_feature 5: note = DNA
ttaacttccacacatgatcacat

SEQ ID NO: 1231 - DNA, 23 bp, synthetic construct
  source 1..23: mol_type = other DNA
  modified_base 1: mod_base = OTHER; note = 2'-O-methyluridine-3'-phosphate 5'-(E)-Vinylphosphonate
  modified_base 3: mod_base = OTHER; note = 2'-O-methyladenosine-3'-phosphate
  modified_base 4: mod_base = OTHER; note = 2'-O-methyluridine-3'-phosphate
  modified_base 6: mod_base = OTHER; note = 2'-O-methyladenosine-3'-phosphate
  modified_base 8: mod_base = OTHER; note = 2'-O-methyluridine-3'-phosphate
  modified_base 9: mod_base = OTHER; note = 2'-O-methyluridine-3'-phosphate
  modified_base 10: mod_base = OTHER; note = 2'-O-methylcytidine-3'-phosphate
  modified_base 11: mod_base = OTHER; note = 2'-O-methylcytidine-3'-phosphate
  modified_base 13: mod_base = OTHER; note = 2'-O-methylcytidine-3'-phosphate
  modified_base 14: mod_base = OTHER; note = 2'-deoxy-2'-fluoroadenosine-3'-phosphate
  modified_base 15: mod_base = OTHER; note = 2'-O-methylcytidine-3'-phosphate
  modified_base 16: mod_base = OTHER; note = 2'-O-methyladenosine-3'-phosphate
  modified_base 17: mod_base = OTHER; note = 2'-O-methyluridine-3'-phosphate
  modified_base 18: mod_base = OTHER; note = 2'-O-methylguanosine-3'-phosphate
  modified_base 19: mod_base = OTHER; note = 2'-O-methyladenosine-3'-phosphate
  modified_base 20: mod_base = OTHER; note = 2'-O-methyluridine-3'-phosphate
  modified_base 21: mod_base = OTHER; note = 2'-O-methylcytidine-3'-phosphorothioate
  modified_base 22: mod_base = OTHER; note = 2'-O-methyladenosine-3'-phosphorothioate
  modified_base 23: mod_base = OTHER; note = 2'-O-methylcytidine
  misc_feature 1: note = RNA
  misc_feature 3..4: note = RNA
  misc_feature 6: note = RNA
  misc_feature 8..11: note = RNA
  misc_feature 13..23: note = RNA
  misc_feature 2: note = DNA
  misc_feature 5: note = DNA
  misc_feature 7: note = DNA
  misc_feature 12: note = DNA
taataacttccacacatgatcac

SEQ ID NO: 1232 - DNA, 23 bp, synthetic construct
  source 1..23: mol_type = other DNA
  modified_base 1: mod_base = OTHER; note = 2'-O-methyluridine-3'-phosphate 5'-(E)-Vinylphosphonate
  modified_base 3: mod_base = OTHER; note = 2'-O-methyladenosine-3'-phosphate
  modified_base 4: mod_base = OTHER; note = 2'-O-methyladenosine-3'-phosphate
  modified_base 6: mod_base = OTHER; note = 2'-O-methyladenosine-3'-phosphate
  modified_base 8: mod_base = OTHER; note = 2'-O-methylcytidine-3'-phosphate
  modified_base 9: mod_base = OTHER; note = 2'-O-methyluridine-3'-phosphate
  modified_base 10: mod_base = OTHER; note = 2'-O-methyluridine-3'-phosphate
  modified_base 11: mod_base = OTHER; note = 2'-O-methylcytidine-3'-phosphate
  modified_base 13: mod_base = OTHER; note = 2'-O-methyladenosine-3'-phosphate
  modified_base 14: mod_base = OTHER; note = 2'-deoxy-2'-fluorocytidine-3'-phosphate
  modified_base 15: mod_base = OTHER; note = 2'-O-methyladenosine-3'-phosphate
  modified_base 16: mod_base = OTHER; note = 2'-O-methylcytidine-3'-phosphate
  modified_base 17: mod_base = OTHER; note = 2'-O-methyladenosine-3'-phosphate
  modified_base 18: mod_base = OTHER; note = 2'-O-methyluridine-3'-phosphate
  modified_base 19: mod_base = OTHER; note = 2'-O-methylguanosine-3'-phosphate
  modified_base 20: mod_base = OTHER; note = 2'-O-methyladenosine-3'-phosphate
  modified_base 21: mod_base = OTHER; note = 2'-O-methyluridine-3'-phosphorothioate
  modified_base 22: mod_base = OTHER; note = 2'-O-methylcytidine-3'-phosphorothioate
  modified_base 23: mod_base = OTHER; note = 2'-O-methyladenosine
  misc_feature 1: note = RNA
  misc_feature 3..4: note = RNA
  misc_feature 6: note = RNA
  misc_feature 8..11: note = RNA
  misc_feature 13..23: note = RNA
  misc_feature 2: note = DNA
  misc_feature 5: note = DNA
  misc_feature 7: note = DNA
  misc_feature 12: note = DNA
ttaataacttccacacatgatca

SEQ ID NO: 1233 - DNA, 23 bp, synthetic construct
  source 1..23: mol_type = other DNA
  modified_base 1: mod_base = OTHER; note = 2'-O-methyluridine-3'-phosphate 5'-(E)-Vinylphosphonate
  modified_base 3: mod_base = OTHER; note = 2'-O-methyladenosine-3'-phosphate
  modified_base 4: mod_base = OTHER; note = 2'-O-methyluridine-3'-phosphate
  modified_base 6: mod_base = OTHER; note = 2'-O-methyluridine-3'-phosphate
  modified_base 8: mod_base = OTHER; note = 2'-O-methyladenosine-3'-phosphate
  modified_base 9: mod_base = OTHER; note = 2'-O-methylguanosine-3'-phosphate
  modified_base 10: mod_base = OTHER; note = 2'-O-methyluridine-3'-phosphate
  modified_base 11: mod_base = OTHER; note = 2'-O-methyladenosine-3'-phosphate
  modified_base 13: mod_base = OTHER; note = 2'-O-methyluridine-3'-phosphate
  modified_base 14: mod_base = OTHER; note = 2'-deoxy-2'-fluoroadenosine-3'-phosphate
  modified_base 15: mod_base = OTHER; note = 2'-O-methyladenosine-3'-phosphate
  modified_base 16: mod_base = OTHER; note = 2'-O-methylguanosine-3'-phosphate
  modified_base 17: mod_base = OTHER; note = 2'-O-methyluridine-3'-phosphate
  modified_base 18: mod_base = OTHER; note = 2'-O-methyluridine-3'-phosphate
  modified_base 19: mod_base = OTHER; note = 2'-O-methylguanosine-3'-phosphate
  modified_base 20: mod_base = OTHER; note = 2'-O-methylcytidine-3'-phosphate
  modified_base 21: mod_base = OTHER; note = 2'-O-methyladenosine-3'-phosphorothioate
  modified_base 22: mod_base = OTHER; note = 2'-O-methyladenosine-3'-phosphorothioate
  modified_base 23: mod_base = OTHER; note = 2'-O-methyladenosine
  misc_feature 1: note = RNA
  misc_feature 3..4: note = RNA
  misc_feature 6: note = RNA
  misc_feature 8..11: note = RNA
  misc_feature 13..23: note = RNA
  misc_feature 2: note = DNA
  misc_feature 5: note = DNA
  misc_feature 7: note = DNA
  misc_feature 12: note = DNA
tcatttgagtattaagttgcaaa

SEQ ID NO: 1234 - DNA, 23 bp, synthetic construct
  source 1..23: mol_type = other DNA
  modified_base 1: mod_base = OTHER; note = 2'-O-methyluridine-3'-phosphate 5'-(E)-Vinylphosphonate
  modified_base 2: mod_base = OTHER; note = 2'-deoxy-2'-fluoroguanosine-3'-phosphate
  modified_base 3: mod_base = OTHER; note = 2'-O-methylcytidine-3'-phosphate
  modified_base 4: mod_base = OTHER; note = 2'-O-methyluridine-3'-phosphate
  modified_base 6: mod_base = OTHER; note = 2'-O-methyluridine-3'-phosphate
  modified_base 7: mod_base = OTHER; note = Adenosine-glycol nucleic acid (GNA), S-isomer
  modified_base 8: mod_base = OTHER; note = 2'-O-methyluridine-3'-phosphate
  modified_base 9: mod_base = OTHER; note = 2'-O-methyladenosine-3'-phosphate
  modified_base 10: mod_base = OTHER; note = 2'-O-methyladenosine-3'-phosphate
  modified_base 11: mod_base = OTHER; note = 2'-O-methyladenosine-3'-phosphate
  modified_base 12: mod_base = OTHER; note = 2'-O-methylguanosine-3'-phosphate
  modified_base 13: mod_base = OTHER; note = 2'-O-methyladenosine-3'-phosphate
  modified_base 14: mod_base = OTHER; note = 2'-deoxy-2'-fluoroguanosine-3'-phosphate
  modified_base 15: mod_base = OTHER; note = 2'-O-methyladenosine-3'-phosphate
  modified_base 16: mod_base = OTHER; note = 2'-deoxy-2'-fluoroguanosine-3'-phosphate
  modified_base 17: mod_base = OTHER; note = 2'-O-methyladenosine-3'-phosphate
  modified_base 18: mod_base = OTHER; note = 2'-O-methyladenosine-3'-phosphate
  modified_base 19: mod_base = OTHER; note = 2'-O-methyladenosine-3'-phosphate
  modified_base 20: mod_base = OTHER; note = 2'-O-methylguanosine-3'-phosphate
  modified_base 21: mod_base = OTHER; note = 2'-O-methylguanosine-3'-phosphorothioate
  modified_base 22: mod_base = OTHER; note = 2'-O-methylcytidine-3'-phosphorothioate
  modified_base 23: mod_base = OTHER; note = 2'-O-methyluridine
  misc_feature 1..4: note = RNA
  misc_feature 6..23: note = RNA
  misc_feature 5: note = DNA
tgctgtataaagagagaaaggct

SEQ ID NO: 1235 - DNA, 23 bp, synthetic construct
  source 1..23: mol_type = other DNA
  modified_base 1: mod_base = OTHER; note = 2'-O-methyluridine-3'-phosphate 5'-(E)-Vinylphosphonate
  modified_base 2: mod_base = OTHER; note = 2'-deoxy-2'-fluoroadenosine-3'-phosphate
  modified_base 3: mod_base = OTHER; note = 2'-O-methylguanosine-3'-phosphate
  modified_base 4: mod_base = OTHER; note = 2'-O-methyladenosine-3'-phosphate
  modified_base 6: mod_base = OTHER; note = 2'-O-methyladenosine-3'-phosphate
  modified_base 7: mod_base = OTHER; note = Adenosine-glycol nucleic acid (GNA), S-isomer
  modified_base 8: mod_base = OTHER; note = 2'-O-methyluridine-3'-phosphate
  modified_base 9: mod_base = OTHER; note = 2'-O-methyladenosine-3'-phosphate
  modified_base 10: mod_base = OTHER; note = 2'-O-methylcytidine-3'-phosphate
  modified_base 11: mod_base = OTHER; note = 2'-O-methyladenosine-3'-phosphate
  modified_base 12: mod_base = OTHER; note = 2'-O-methylguanosine-3'-phosphate
  modified_base 13: mod_base = OTHER; note = 2'-O-methylcytidine-3'-phosphate
  modified_base 14: mod_base = OTHER; note = 2'-deoxy-2'-fluorouridine-3'-phosphate
  modified_base 15: mod_base = OTHER; note = 2'-O-methylguanosine-3'-phosphate
  modified_base 16: mod_base = OTHER; note = 2'-deoxy-2'-fluorouridine-3'-phosphate
  modified_base 17: mod_base = OTHER; note = 2'-O-methyladenosine-3'-phosphate
  modified_base 18: mod_base = OTHER; note = 2'-O-methyluridine-3'-phosphate
  modified_base 19: mod_base = OTHER; note = 2'-O-methyladenosine-3'-phosphate
  modified_base 20: mod_base = OTHER; note = 2'-O-methyladenosine-3'-phosphate
  modified_base 21: mod_base = OTHER; note = 2'-O-methyladenosine-3'-phosphorothioate
  modified_base 22: mod_base = OTHER; note = 2'-O-methylguanosine-3'-phosphorothioate
  modified_base 23: mod_base = OTHER; note = 2'-O-methyladenosine
  misc_feature 1..4: note = RNA
  misc_feature 6..23: note = RNA
  misc_feature 5: note = DNA
tagacaatacagctgtataaaga

SEQ ID NO: 1236 - DNA, 23 bp, synthetic construct
  source 1..23: mol_type = other DNA
  modified_base 1: mod_base = OTHER; note = 2'-O-methyluridine-3'-phosphate 5'-(E)-Vinylphosphonate
  modified_base 3: mod_base = OTHER; note = 2'-O-methylguanosine-3'-phosphate
  modified_base 4: mod_base = OTHER; note = 2'-O-methyladenosine-3'-phosphate
  modified_base 6: mod_base = OTHER; note = 2'-O-methyladenosine-3'-phosphate
  modified_base 8: mod_base = OTHER; note = 2'-O-methyluridine-3'-phosphate
  modified_base 9: mod_base = OTHER; note = 2'-O-methyladenosine-3'-phosphate
  modified_base 10: mod_base = OTHER; note = 2'-O-methylcytidine-3'-phosphate
  modified_base 11: mod_base = OTHER; note = 2'-O-methyladenosine-3'-phosphate
  modified_base 13: mod_base = OTHER; note = 2'-O-methylcytidine-3'-phosphate
  modified_base 14: mod_base = OTHER; note = 2'-deoxy-2'-fluorouridine-3'-phosphate
  modified_base 15: mod_base = OTHER; note = 2'-O-methylguanosine-3'-phosphate
  modified_base 16: mod_base = OTHER; note = 2'-O-methyluridine-3'-phosphate
  modified_base 17: mod_base = OTHER; note = 2'-O-methyladenosine-3'-phosphate
  modified_base 18: mod_base = OTHER; note = 2'-O-methyluridine-3'-phosphate
  modified_base 19: mod_base = OTHER; note = 2'-O-methyladenosine-3'-phosphate
  modified_base 20: mod_base = OTHER; note = 2'-O-methyladenosine-3'-phosphate
  modified_base 21: mod_base = OTHER; note = 2'-O-methyladenosine-3'-phosphorothioate
  modified_base 22: mod_base = OTHER; note = 2'-O-methylguanosine-3'-phosphorothioate
  modified_base 23: mod_base = OTHER; note = 2'-O-methyladenosine
  misc_feature 1: note = RNA
  misc_feature 3..4: note = RNA
  misc_feature 6: note = RNA
  misc_feature 8..11: note = RNA
  misc_feature 13..23: note = RNA
  misc_feature 2: note = DNA
  misc_feature 5: note = DNA
  misc_feature 7: note = DNA
  misc_feature 12: note = DNA
tagacaatacagctgtataaaga

SEQ ID NO: 1237 - DNA, 23 bp, synthetic construct
  source 1..23: mol_type = other DNA
  modified_base 1: mod_base = OTHER; note = 2'-O-methyluridine-3'-phosphate 5'-(E)-Vinylphosphonate
  modified_base 3: mod_base = OTHER; note = 2'-O-methylcytidine-3'-phosphate
  modified_base 4: mod_base = OTHER; note = 2'-O-methyladenosine-3'-phosphate
  modified_base 6: mod_base = OTHER; note = 2'-O-methyluridine-3'-phosphate
  modified_base 8: mod_base = OTHER; note = 2'-O-methylcytidine-3'-phosphate
  modified_base 9: mod_base = OTHER; note = 2'-O-methyladenosine-3'-phosphate
  modified_base 10: mod_base = OTHER; note = 2'-O-methyladenosine-3'-phosphate
  modified_base 11: mod_base = OTHER; note = 2'-O-methylguanosine-3'-phosphate
  modified_base 13: mod_base = OTHER; note = 2'-O-methyluridine-3'-phosphate
  modified_base 14: mod_base = OTHER; note = 2'-deoxy-2'-fluorocytidine-3'-phosphate
  modified_base 15: mod_base = OTHER; note = 2'-O-methyladenosine-3'-phosphate
  modified_base 16: mod_base = OTHER; note = 2'-O-methylguanosine-3'-phosphate
  modified_base 17: mod_base = OTHER; note = 2'-O-methyladenosine-3'-phosphate
  modified_base 18: mod_base = OTHER; note = 2'-O-methylcytidine-3'-phosphate
  modified_base 19: mod_base = OTHER; note = 2'-O-methyladenosine-3'-phosphate
  modified_base 20: mod_base = OTHER; note = 2'-O-methyladenosine-3'-phosphate
  modified_base 21: mod_base = OTHER; note = 2'-O-methyluridine-3'-phosphorothioate
  modified_base 22: mod_base = OTHER; note = 2'-O-methyladenosine-3'-phosphorothioate
  modified_base 23: mod_base = OTHER; note = 2'-O-methylcytidine
  misc_feature 1: note = RNA
  misc_feature 3..4: note = RNA
  misc_feature 6: note = RNA
  misc_feature 8..11: note = RNA
  misc_feature 13..23: note = RNA
  misc_feature 2: note = DNA
  misc_feature 5: note = DNA
  misc_feature 7: note = DNA
  misc_feature 12: note = DNA
tacaatgcaagttcagacaatac

SEQ ID NO: 1238 - DNA, 23 bp, synthetic construct
  source 1..23: mol_type = other DNA
  modified_base 1: mod_base = OTHER; note = 2'-O-methyluridine-3'-phosphate 5'-(E)-Vinylphosphonate
  modified_base 2: mod_base = OTHER; note = 2'-deoxy-2'-fluorouridine-3'-phosphate
  modified_base 3: mod_base = OTHER; note = 2'-O-methylcytidine-3'-phosphate
  modified_base 4: mod_base = OTHER; note = 2'-O-methyladenosine-3'-phosphate
  modified_base 6: mod_base = OTHER; note = 2'-O-methylcytidine-3'-phosphate
  modified_base 7: mod_base = OTHER; note = Adenosine-glycol nucleic acid (GNA), S-isomer
  modified_base 8: mod_base = OTHER; note = 2'-O-methyladenosine-3'-phosphate
  modified_base 9: mod_base = OTHER; note = 2'-O-methylcytidine-3'-phosphate
  modified_base 10: mod_base = OTHER; note = 2'-O-methyluridine-3'-phosphate
  modified_base 11: mod_base = OTHER; note = 2'-O-methylcytidine-3'-phosphate
  modified_base 12: mod_base = OTHER; note = 2'-O-methyluridine-3'-phosphate
  modified_base 13: mod_base = OTHER; note = 2'-O-methyladenosine-3'-phosphate
  modified_base 14: mod_base = OTHER; note = 2'-deoxy-2'-fluorocytidine-3'-phosphate
  modified_base 15: mod_base = OTHER; note = 2'-O-methyladenosine-3'-phosphate
  modified_base 16: mod_base = OTHER; note = 2'-deoxy-2'-fluoroguanosine-3'-phosphate
  modified_base 17: mod_base = OTHER; note = 2'-O-methylguanosine-3'-phosphate
  modified_base 18: mod_base = OTHER; note = 2'-O-methylcytidine-3'-phosphate
  modified_base 19: mod_base = OTHER; note = 2'-O-methylcytidine-3'-phosphate
  modified_base 20: mod_base = OTHER; note = 2'-O-methyladenosine-3'-phosphate
  modified_base 21: mod_base = OTHER; note = 2'-O-methyladenosine-3'-phosphorothioate
  modified_base 22: mod_base = OTHER; note = 2'-O-methyluridine-3'-phosphorothioate
  modified_base 23: mod_base = OTHER; note = 2'-O-methylcytidine
  misc_feature 1..4: note = RNA
  misc_feature 6..23: note = RNA
  misc_feature 5: note = DNA
ttcagcaactctacaggccaatc

SEQ ID NO: 1239 - DNA, 23 bp, synthetic construct
  source 1..23: mol_type = other DNA
  modified_base 1: mod_base = OTHER; note = 2'-O-methyluridine-3'-phosphate 5'-(E)-Vinylphosphonate
  modified_base 2: mod_base = OTHER; note = 2'-deoxy-2'-fluorouridine-3'-phosphate
  modified_base 3: mod_base = OTHER; note = 2'-O-methylguanosine-3'-phosphate
  modified_base 4: mod_base = OTHER; note = 2'-O-methylguanosine-3'-phosphate
  modified_base 6: mod_base = OTHER; note = 2'-O-methyluridine-3'-phosphate
  modified_base 7: mod_base = OTHER; note = Adenosine-glycol nucleic acid (GNA), S-isomer
  modified_base 8: mod_base = OTHER; note = 2'-O-methylguanosine-3'-phosphate
  modified_base 9: mod_base = OTHER; note = 2'-O-methyluridine-3'-phosphate
  modified_base 10: mod_base = OTHER; note = 2'-O-methylguanosine-3'-phosphate
  modified_base 11: mod_base = OTHER; note = 2'-O-methyluridine-3'-phosphate
  modified_base 12: mod_base = OTHER; note = 2'-O-methylguanosine-3'-phosphate
  modified_base 13: mod_base = OTHER; note = 2'-O-methyluridine-3'-phosphate
  modified_base 14: mod_base = OTHER; note = 2'-deoxy-2'-fluorocytidine-3'-phosphate
  modified_base 15: mod_base = OTHER; note = 2'-O-methyladenosine-3'-phosphate
  modified_base 16: mod_base = OTHER; note = 2'-deoxy-2'-fluoroguanosine-3'-phosphate
  modified_base 17: mod_base = OTHER; note = 2'-O-methylguanosine-3'-phosphate
  modified_base 18: mod_base = OTHER; note = 2'-O-methylcytidine-3'-phosphate
  modified_base 19: mod_base = OTHER; note = 2'-O-methyladenosine-3'-phosphate
  modified_base 20: mod_base = OTHER; note = 2'-O-methylcytidine-3'-phosphate
  modified_base 21: mod_base = OTHER; note = 2'-O-methyluridine-3'-phosphorothioate
  modified_base 22: mod_base = OTHER; note = 2'-O-methyluridine-3'-phosphorothioate
  modified_base 23: mod_base = OTHER; note = 2'-O-methyluridine
  misc_feature 1..4: note = RNA
  misc_feature 6..23: note = RNA
  misc_feature 5: note = DNA
ttggttagtgtgtcaggcacttt

SEQ ID NO: 1240 - DNA, 23 bp, synthetic construct
  source 1..23: mol_type = other DNA
  modified_base 1: mod_base = OTHER; note = 2'-O-methyluridine-3'-phosphate 5'-(E)-Vinylphosphonate
  modified_base 3: mod_base = OTHER; note = 2'-O-methyladenosine-3'-phosphate
  modified_base 4: mod_base = OTHER; note = 2'-O-methylguanosine-3'-phosphate
  modified_base 6: mod_base = OTHER; note = 2'-O-methyluridine-3'-phosphate
  modified_base 8: mod_base = OTHER; note = 2'-O-methylguanosine-3'-phosphate
  modified_base 9: mod_base = OTHER; note = 2'-O-methylguanosine-3'-phosphate
  modified_base 10: mod_base = OTHER; note = 2'-O-methyluridine-3'-phosphate
  modified_base 11: mod_base = OTHER; note = 2'-O-methyluridine-3'-phosphate
  modified_base 13: mod_base = OTHER; note = 2'-O-methylguanosine-3'-phosphate
  modified_base 14: mod_base = OTHER; note = 2'-deoxy-2'-fluorouridine-3'-phosphate
  modified_base 15: mod_base = OTHER; note = 2'-O-methylguanosine-3'-phosphate
  modified_base 16: mod_base = OTHER; note = 2'-O-methyluridine-3'-phosphate
  modified_base 17: mod_base = OTHER; note = 2'-O-methylguanosine-3'-phosphate
  modified_base 18: mod_base = OTHER; note = 2'-O-methyluridine-3'-phosphate
  modified_base 19: mod_base = OTHER; note = 2'-O-methylcytidine-3'-phosphate
  modified_base 20: mod_base = OTHER; note = 2'-O-methyladenosine-3'-phosphate
  modified_base 21: mod_base = OTHER; note = 2'-O-methylguanosine-3'-phosphorothioate
  modified_base 22: mod_base = OTHER; note = 2'-O-methylguanosine-3'-phosphorothioate
  modified_base 23: mod_base = OTHER; note = 2'-O-methylcytidine
  misc_feature 1: note = RNA
  misc_feature 3..4: note = RNA
  misc_feature 6: note = RNA
  misc_feature 8..11: note = RNA
  misc_feature 13..23: note = RNA
  misc_feature 2: note = DNA
  misc_feature 5: note = DNA
  misc_feature 7: note = DNA
  misc_feature 12: note = DNA
tcagcttggttagtgtgtcaggc

SEQ ID NO: 1241 - DNA, 23 bp, synthetic construct
  source 1..23: mol_type = other DNA
  modified_base 1: mod_base = OTHER; note = 2'-O-methyluridine-3'-phosphate 5'-(E)-Vinylphosphonate
  modified_base 3: mod_base = OTHER; note = 2'-O-methyladenosine-3'-phosphate
  modified_base 4: mod_base = OTHER; note = 2'-O-methylguanosine-3'-phosphate
  modified_base 6: mod_base = OTHER; note = 2'-O-methyladenosine-3'-phosphate
  modified_base 8: mod_base = OTHER; note = 2'-O-methyladenosine-3'-phosphate
  modified_base 9: mod_base = OTHER; note = 2'-O-methylcytidine-3'-phosphate
  modified_base 10: mod_base = OTHER; note = 2'-O-methyluridine-3'-phosphate
  modified_base 11: mod_base = OTHER; note = 2'-O-methylcytidine-3'-phosphate
  modified_base 13: mod_base = OTHER; note = 2'-O-methylguanosine-3'-phosphate
  modified_base 14: mod_base = OTHER; note = 2'-deoxy-2'-fluorocytidine-3'-phosphate
  modified_base 15: mod_base = OTHER; note = 2'-O-methyluridine-3'-phosphate
  modified_base 16: mod_base = OTHER; note = 2'-O-methyluridine-3'-phosphate
  modified_base 17: mod_base = OTHER; note = 2'-O-methylguanosine-3'-phosphate
  modified_base 18: mod_base = OTHER; note = 2'-O-methylguanosine-3'-phosphate
  modified_base 19: mod_base = OTHER; note = 2'-O-methyluridine-3'-phosphate
  modified_base 20: mod_base = OTHER; note = 2'-O-methyluridine-3'-phosphate
  modified_base 21: mod_base = OTHER; note = 2'-O-methyladenosine-3'-phosphorothioate
  modified_base 22: mod_base = OTHER; note = 2'-O-methylguanosine-3'-phosphorothioate
  modified_base 23: mod_base = OTHER; note = 2'-O-methyluridine
  misc_feature 1: note = RNA
  misc_feature 3..4: note = RNA
  misc_feature 6: note = RNA
  misc_feature 8..11: note = RNA
  misc_feature 13..23: note = RNA
  misc_feature 2: note = DNA
  misc_feature 5: note = DNA
  misc_feature 7: note = DNA
  misc_feature 12: note = DNA
ttaggaaactcagcttggttagt

SEQ ID NO: 1242 - DNA, 23 bp, synthetic construct
  source 1..23: mol_type = other DNA
  modified_base 1: mod_base = OTHER; note = 2'-O-methyluridine-3'-phosphate 5'-(E)-Vinylphosphonate
  modified_base 2: mod_base = OTHER; note = 2'-deoxy-2'-fluorouridine-3'-phosphate
  modified_base 3: mod_base = OTHER; note = 2'-O-methyluridine-3'-phosphate
  modified_base 4: mod_base = OTHER; note = 2'-O-methylcytidine-3'-phosphate
  modified_base 6: mod_base = OTHER; note = 2'-O-methylcytidine-3'-phosphate
  modified_base 7: mod_base = OTHER; note = Adenosine-glycol nucleic acid (GNA), S-isomer
  modified_base 8: mod_base = OTHER; note = 2'-O-methyluridine-3'-phosphate
  modified_base 9: mod_base = OTHER; note = 2'-O-methyladenosine-3'-phosphate
  modified_base 10: mod_base = OTHER; note = 2'-O-methylguanosine-3'-phosphate
  modified_base 11: mod_base = OTHER; note = 2'-O-methylguanosine-3'-phosphate
  modified_base 12: mod_base = OTHER; note = 2'-O-methyladenosine-3'-phosphate
  modified_base 13: mod_base = OTHER; note = 2'-O-methyladenosine-3'-phosphate
  modified_base 14: mod_base = OTHER; note = 2'-deoxy-2'-fluoroadenosine-3'-phosphate
  modified_base 15: mod_base = OTHER; note = 2'-O-methylcytidine-3'-phosphate
  modified_base 16: mod_base = OTHER; note = 2'-deoxy-2'-fluorouridine-3'-phosphate
  modified_base 17: mod_base = OTHER; note = 2'-O-methylcytidine-3'-phosphate
  modified_base 18: mod_base = OTHER; note = 2'-O-methyladenosine-3'-phosphate
  modified_base 19: mod_base = OTHER; note = 2'-O-methylguanosine-3'-phosphate
  modified_base 20: mod_base = OTHER; note = 2'-O-methylcytidine-3'-phosphate
  modified_base 21: mod_base = OTHER; note = 2'-O-methyluridine-3'-phosphorothioate
  modified_base 22: mod_base = OTHER; note = 2'-O-methyluridine-3'-phosphorothioate
  modified_base 23: mod_base = OTHER; note = 2'-O-methylguanosine
  misc_feature 1..4: note = RNA
  misc_feature 6..23: note = RNA
  misc_feature 5: note = DNA
tttcccataggaaactcagcttg

SEQ ID NO: 1243 - DNA, 23 bp, synthetic construct
  source 1..23: mol_type = other DNA
  modified_base 1: mod_base = OTHER; note = 2'-O-methyluridine-3'-phosphate 5'-(E)-Vinylphosphonate
  modified_base 3: mod_base = OTHER; note = 2'-O-methylcytidine-3'-phosphate
  modified_base 4: mod_base = OTHER; note = 2'-O-methyladenosine-3'-phosphate
  modified_base 6: mod_base = OTHER; note = 2'-O-methyluridine-3'-phosphate
  modified_base 8: mod_base = OTHER; note = 2'-O-methylguanosine-3'-phosphate
  modified_base 9: mod_base = OTHER; note = 2'-O-methyluridine-3'-phosphate
  modified_base 10: mod_base = OTHER; note = 2'-O-methyluridine-3'-phosphate
  modified_base 11: mod_base = OTHER; note = 2'-O-methylcytidine-3'-phosphate
  modified_base 13: mod_base = OTHER; note = 2'-O-methylcytidine-3'-phosphate
  modified_base 14: mod_base = OTHER; note = 2'-deoxy-2'-fluoroadenosine-3'-phosphate
  modified_base 15: mod_base = OTHER; note = 2'-O-methyluridine-3'-phosphate
  modified_base 16: mod_base = OTHER; note = 2'-O-methyladenosine-3'-phosphate
  modified_base 17: mod_base = OTHER; note = 2'-O-methylguanosine-3'-phosphate
  modified_base 18: mod_base = OTHER; note = 2'-O-methylguanosine-3'-phosphate
  modified_base 19: mod_base = OTHER; note = 2'-O-methyladenosine-3'-phosphate
  modified_base 20: mod_base = OTHER; note = 2'-O-methyladenosine-3'-phosphate
  modified_base 21: mod_base = OTHER; note = 2'-O-methyladenosine-3'-phosphorothioate
  modified_base 22: mod_base = OTHER; note = 2'-O-methylcytidine-3'-phosphorothioate
  modified_base 23: mod_base = OTHER; note = 2'-O-methyluridine
  misc_feature 1: note = RNA
  misc_feature 3..4: note = RNA
  misc_feature 6: note = RNA
  misc_feature 8..11: note = RNA
  misc_feature 13..23: note = RNA
  misc_feature 2: note = DNA
  misc_feature 5: note = DNA
  misc_feature 7: note = DNA
  misc_feature 12: note = DNA
ttcaattgttcccataggaaact

SEQ ID NO: 1244 - DNA, 23 bp, synthetic construct
  source 1..23: mol_type = other DNA
  modified_base 1: mod_base = OTHER; note = 2'-O-methyluridine-3'-phosphate 5'-(E)-Vinylphosphonate
  modified_base 2: mod_base = OTHER; note = 2'-deoxy-2'-fluorouridine-3'-phosphate
  modified_base 3: mod_base = OTHER; note = 2'-O-methyluridine-3'-phosphate
  modified_base 4: mod_base = OTHER; note = 2'-O-methylguanosine-3'-phosphate
  modified_base 6: mod_base = OTHER; note = 2'-O-methyladenosine-3'-phosphate
  modified_base 7: mod_base = OTHER; note = Thymidine-glycol nucleic acid (GNA), S-Isomer
  modified_base 8: mod_base = OTHER; note = 2'-O-methyluridine-3'-phosphate
  modified_base 9: mod_base = OTHER; note = 2'-O-methylguanosine-3'-phosphate
  modified_base 10: mod_base = OTHER; note = 2'-O-methyluridine-3'-phosphate
  modified_base 11: mod_base = OTHER; note = 2'-O-methyluridine-3'-phosphate
  modified_base 12: mod_base = OTHER; note = 2'-O-methyladenosine-3'-phosphate
  modified_base 13: mod_base = OTHER; note = 2'-O-methylcytidine-3'-phosphate
  modified_base 14: mod_base = OTHER; note = 2'-deoxy-2'-fluorouridine-3'-phosphate
  modified_base 15: mod_base = OTHER; note = 2'-O-methylcytidine-3'-phosphate
  modified_base 16: mod_base = OTHER; note = 2'-deoxy-2'-fluorocytidine-3'-phosphate
  modified_base 17: mod_base = OTHER; note = 2'-O-methyluridine-3'-phosphate
  modified_base 18: mod_base = OTHER; note = 2'-O-methylcytidine-3'-phosphate
  modified_base 19: mod_base = OTHER; note = 2'-O-methylguanosine-3'-phosphate
  modified_base 20: mod_base = OTHER; note = 2'-O-methyladenosine-3'-phosphate
  modified_base 21: mod_base = OTHER; note = 2'-O-methylcytidine-3'-phosphorothioate
  modified_base 22: mod_base = OTHER; note = 2'-O-methylcytidine-3'-phosphorothioate
  modified_base 23: mod_base = OTHER; note = 2'-O-methyladenosine
  misc_feature 1..4: note = RNA
  misc_feature 6..23: note = RNA
  misc_feature 5: note = DNA
tttgtattgttactcctcgacca

SEQ ID NO: 1245 - DNA, 23 bp, synthetic construct
  source 1..23: mol_type = other DNA
  modified_base 1: mod_base = OTHER; note = 2'-O-methyluridine-3'-phosphate 5'-(E)-Vinylphosphonate
  modified_base 3: mod_base = OTHER; note = 2'-O-methyluridine-3'-phosphate
  modified_base 4: mod_base = OTHER; note = 2'-O-methylguanosine-3'-phosphate
  modified_base 6: mod_base = OTHER; note = 2'-O-methyladenosine-3'-phosphate
  modified_base 8: mod_base = OTHER; note = 2'-O-methyluridine-3'-phosphate
  modified_base 9: mod_base = OTHER; note = 2'-O-methylguanosine-3'-phosphate
  modified_base 10: mod_base = OTHER; note = 2'-O-methyluridine-3'-phosphate
  modified_base 11: mod_base = OTHER; note = 2'-O-methyluridine-3'-phosphate
  modified_base 13: mod_base = OTHER; note = 2'-O-methylcytidine-3'-phosphate
  modified_base 14: mod_base = OTHER; note = 2'-deoxy-2'-fluorouridine-3'-phosphate
  modified_base 15: mod_base = OTHER; note = 2'-O-methylcytidine-3'-phosphate
  modified_base 16: mod_base = OTHER; note = 2'-O-methylcytidine-3'-phosphate
  modified_base 17: mod_base = OTHER; note = 2'-O-methyluridine-3'-phosphate
  modified_base 18: mod_base = OTHER; note = 2'-O-methylcytidine-3'-phosphate
  modified_base 19: mod_base = OTHER; note = 2'-O-methylguanosine-3'-phosphate
  modified_base 20: mod_base = OTHER; note = 2'-O-methyladenosine-3'-phosphate
  modified_base 21: mod_base = OTHER; note = 2'-O-methylcytidine-3'-phosphorothioate
  modified_base 22: mod_base = OTHER; note = 2'-O-methylcytidine-3'-phosphorothioate
  modified_base 23: mod_base = OTHER; note = 2'-O-methyladenosine
  misc_feature 1: note = RNA
  misc_feature 3..4: note = RNA
  misc_feature 6: note = RNA
  misc_feature 8..11: note = RNA
  misc_feature 13..23: note = RNA
  misc_feature 2: note = DNA
  misc_feature 5: note = DNA
  misc_feature 7: note = DNA
  misc_feature 12: note = DNA
tttgtattgttactcctcgacca

SEQ ID NO: 1246 - DNA, 23 bp, synthetic construct
  source 1..23: mol_type = other DNA
  modified_base 1: mod_base = OTHER; note = 2'-O-methyluridine-3'-phosphate 5'-(E)-Vinylphosphonate
  modified_base 2: mod_base = OTHER; note = 2'-deoxy-2'-fluoroadenosine-3'-phosphate
  modified_base 3: mod_base = OTHER; note = 2'-O-methyladenosine-3'-phosphate
  modified_base 4: mod_base = OTHER; note = 2'-O-methylguanosine-3'-phosphate
  modified_base 6: mod_base = OTHER; note = 2'-O-methyladenosine-3'-phosphate
  modified_base 7: mod_base = OTHER; note = Adenosine-glycol nucleic acid (GNA), S-isomer
  modified_base 8: mod_base = OTHER; note = 2'-O-methylguanosine-3'-phosphate
  modified_base 9: mod_base = OTHER; note = 2'-O-methylguanosine-3'-phosphate
  modified_base 10: mod_base = OTHER; note = 2'-O-methylcytidine-3'-phosphate
  modified_base 11: mod_base = OTHER; note = 2'-O-methyluridine-3'-phosphate
  modified_base 12: mod_base = OTHER; note = 2'-O-methyladenosine-3'-phosphate
  modified_base 13: mod_base = OTHER; note = 2'-O-methylguanosine-3'-phosphate
  modified_base 14: mod_base = OTHER; note = 2'-deoxy-2'-fluoroguanosine-3'-phosphate
  modified_base 15: mod_base = OTHER; note = 2'-O-methylguanosine-3'-phosphate
  modified_base 16: mod_base = OTHER; note = 2'-deoxy-2'-fluorouridine-3'-phosphate
  modified_base 17: mod_base = OTHER; note = 2'-O-methyluridine-3'-phosphate
  modified_base 18: mod_base = OTHER; note = 2'-O-methyluridine-3'-phosphate
  modified_base 19: mod_base = OTHER; note = 2'-O-methylguanosine-3'-phosphate
  modified_base 20: mod_base = OTHER; note = 2'-O-methyladenosine-3'-phosphate
  modified_base 21: mod_base = OTHER; note = 2'-O-methyluridine-3'-phosphorothioate
  modified_base 22: mod_base = OTHER; note = 2'-O-methyladenosine-3'-phosphorothioate
  modified_base 23: mod_base = OTHER; note = 2'-O-methyladenosine
  misc_feature 1..4: note = RNA
  misc_feature 6..23: note = RNA
  misc_feature 5: note = DNA
taagcaaggctagggtttgataa

SEQ ID NO: 1247 - DNA, 23 bp, synthetic construct
  source 1..23: mol_type = other DNA
  modified_base 1: mod_base = OTHER; note = 2'-O-methyluridine-3'-phosphate 5'-(E)-Vinylphosphonate
  modified_base 2: mod_base = OTHER; note = 2'-deoxy-2'-fluoroguanosine-3'-phosphate
  modified_base 3: mod_base = OTHER; note = 2'-O-methylcytidine-3'-phosphate
  modified_base 4: mod_base = OTHER; note = 2'-O-methyluridine-3'-phosphate
  modified_base 6: mod_base = OTHER; note = 2'-O-methylcytidine-3'-phosphate
  modified_base 7: mod_base = OTHER; note = Thymidine-glycol nucleic acid (GNA), S-Isomer
  modified_base 8: mod_base = OTHER; note = 2'-O-methyluridine-3'-phosphate
  modified_base 9: mod_base = OTHER; note = 2'-O-methylcytidine-3'-phosphate
  modified_base 10: mod_base = OTHER; note = 2'-O-methyladenosine-3'-phosphate
  modified_base 11: mod_base = OTHER; note = 2'-O-methyladenosine-3'-phosphate
  modified_base 12: mod_base = OTHER; note = 2'-O-methyladenosine-3'-phosphate
  modified_base 13: mod_base = OTHER; note = 2'-O-methylguanosine-3'-phosphate
  modified_base 14: mod_base = OTHER; note = 2'-deoxy-2'-fluorocytidine-3'-phosphate
  modified_base 15: mod_base = OTHER; note = 2'-O-methyladenosine-3'-phosphate
  modified_base 16: mod_base = OTHER; note = 2'-deoxy-2'-fluoroadenosine-3'-phosphate
  modified_base 17: mod_base = OTHER; note = 2'-O-methylguanosine-3'-phosphate
  modified_base 18: mod_base = OTHER; note = 2'-O-methylcytidine-3'-phosphate
  modified_base 19: mod_base = OTHER; note = 2'-O-methyladenosine-3'-phosphate
  modified_base 20: mod_base = OTHER; note = 2'-O-methyladenosine-3'-phosphate
  modified_base 21: mod_base = OTHER; note = 2'-O-methyladenosine-3'-phosphorothioate
  modified_base 22: mod_base = OTHER; note = 2'-O-methylguanosine-3'-phosphorothioate
  modified_base 23: mod_base = OTHER; note = 2'-O-methyluridine
  misc_feature 1..4: note = RNA
  misc_feature 6..23: note = RNA
  misc_feature 5: note = DNA
tgctacttcaaagcaagcaaagt

SEQ ID NO: 1248 - DNA, 23 bp, synthetic construct
  source 1..23: mol_type = other DNA
  modified_base 1: mod_base = OTHER; note = 2'-O-methyluridine-3'-phosphate 5'-(E)-Vinylphosphonate
  modified_base 2: mod_base = OTHER; note = 2'-deoxy-2'-fluoroguanosine-3'-phosphate
  modified_base 3: mod_base = OTHER; note = 2'-O-methyladenosine-3'-phosphate
  modified_base 4: mod_base = OTHER; note = 2'-O-methylguanosine-3'-phosphate
  modified_base 6: mod_base = OTHER; note = 2'-O-methyluridine-3'-phosphate
  modified_base 7: mod_base = OTHER; note = Adenosine-glycol nucleic acid (GNA), S-isomer
  modified_base 8: mod_base = OTHER; note = 2'-O-methylcytidine-3'-phosphate
  modified_base 9: mod_base = OTHER; note = 2'-O-methyluridine-3'-phosphate
  modified_base 10: mod_base = OTHER; note = 2'-O-methyluridine-3'-phosphate
  modified_base 11: mod_base = OTHER; note = 2'-O-methylcytidine-3'-phosphate
  modified_base 12: mod_base = OTHER; note = 2'-O-methyladenosine-3'-phosphate
  modified_base 13: mod_base = OTHER; note = 2'-O-methyladenosine-3'-phosphate
  modified_base 14: mod_base = OTHER; note = 2'-deoxy-2'-fluoroadenosine-3'-phosphate
  modified_base 15: mod_base = OTHER; note = 2'-O-methylguanosine-3'-phosphate
  modified_base 16: mod_base = OTHER; note = 2'-deoxy-2'-fluorocytidine-3'-phosphate
  modified_base 17: mod_base = OTHER; note = 2'-O-methyladenosine-3'-phosphate
  modified_base 18: mod_base = OTHER; note = 2'-O-methyladenosine-3'-phosphate
  modified_base 19: mod_base = OTHER; note = 2'-O-methylguanosine-3'-phosphate
  modified_base 20: mod_base = OTHER; note = 2'-O-methylcytidine-3'-phosphate
  modified_base 21: mod_base = OTHER; note = 2'-O-methyladenosine-3'-phosphorothioate
  modified_base 22: mod_base = OTHER; note = 2'-O-methyladenosine-3'-phosphorothioate
  modified_base 23: mod_base = OTHER; note = 2'-O-methyladenosine
  misc_feature 1..4: note = RNA
  misc_feature 6..23: note = RNA
  misc_feature 5: note = DNA
tgagctacttcaaagcaagcaaa

SEQ ID NO: 1249 - DNA, 23 bp, synthetic construct
  source 1..23: mol_type = other DNA
  modified_base 1: mod_base = OTHER; note = 2'-O-methyluridine-3'-phosphate 5'-(E)-Vinylphosphonate
  modified_base 2: mod_base = OTHER; note = 2'-deoxy-2'-fluoroadenosine-3'-phosphate
  modified_base 3: mod_base = OTHER; note = 2'-O-methylguanosine-3'-phosphate
  modified_base 4: mod_base = OTHER; note = 2'-O-methyladenosine-3'-phosphate
  modified_base 6: mod_base = OTHER; note = 2'-O-methylcytidine-3'-phosphate
  modified_base 7: mod_base = OTHER; note = Thymidine-glycol nucleic acid (GNA), S-Isomer
  modified_base 8: mod_base = OTHER; note = 2'-O-methyladenosine-3'-phosphate
  modified_base 9: mod_base = OTHER; note = 2'-O-methylcytidine-3'-phosphate
  modified_base 10: mod_base = OTHER; note = 2'-O-methyluridine-3'-phosphate
  modified_base 11: mod_base = OTHER; note = 2'-O-methyluridine-3'-phosphate
  modified_base 12: mod_base = OTHER; note = 2'-O-methylcytidine-3'-phosphate
  modified_base 13: mod_base = OTHER; note = 2'-O-methyladenosine-3'-phosphate
  modified_base 14: mod_base = OTHER; note = 2'-deoxy-2'-fluoroadenosine-3'-phosphate
  modified_base 15: mod_base = OTHER; note = 2'-O-methyladenosine-3'-phosphate
  modified_base 16: mod_base = OTHER; note = 2'-deoxy-2'-fluoroguanosine-3'-phosphate
  modified_base 17: mod_base = OTHER; note = 2'-O-methylcytidine-3'-phosphate
  modified_base 18: mod_base = OTHER; note = 2'-O-methyladenosine-3'-phosphate
  modified_base 19: mod_base = OTHER; note = 2'-O-methyladenosine-3'-phosphate
  modified_base 20: mod_base = OTHER; note = 2'-O-methylguanosine-3'-phosphate
  modified_base 21: mod_base = OTHER; note = 2'-O-methylcytidine-3'-phosphorothioate
  modified_base 22: mod_base = OTHER; note = 2'-O-methyladenosine-3'-phosphorothioate
  modified_base 23: mod_base = OTHER; note = 2'-O-methyladenosine
  misc_feature 1..4: note = RNA
  misc_feature 6..23: note = RNA
  misc_feature 5: note = DNA
tagagctacttcaaagcaagcaa

SEQ ID NO: 1250 - DNA, 23 bp, synthetic construct
  source 1..23: mol_type = other DNA
  modified_base 1: mod_base = OTHER; note = 2'-O-methyluridine-3'-phosphate 5'-(E)-Vinylphosphonate
  modified_base 3: mod_base = OTHER; note = 2'-O-methyluridine-3'-phosphate
  modified_base 4: mod_base = OTHER; note = 2'-O-methyluridine-3'-phosphate
  modified_base 6: mod_base = OTHER; note = 2'-O-methyladenosine-3'-phosphate
  modified_base 8: mod_base = OTHER; note = 2'-O-methyladenosine-3'-phosphate
  modified_base 9: mod_base = OTHER; note = 2'-O-methylcytidine-3'-phosphate
  modified_base 10: mod_base = OTHER; note = 2'-O-methyluridine-3'-phosphate
  modified_base 11: mod_base = OTHER; note = 2'-O-methyladenosine-3'-phosphate
  modified_base 13: mod_base = OTHER; note = 2'-O-methylguanosine-3'-phosphate
  modified_base 14: mod_base = OTHER; note = 2'-deoxy-2'-fluoroadenosine-3'-phosphate
  modified_base 15: mod_base = OTHER; note = 2'-O-methylguanosine-3'-phosphate
  modified_base 16: mod_base = OTHER; note = 2'-O-methyladenosine-3'-phosphate
  modified_base 17: mod_base = OTHER; note = 2'-O-methylguanosine-3'-phosphate
  modified_base 18: mod_base = OTHER; note = 2'-O-methyladenosine-3'-phosphate
  modified_base 19: mod_base = OTHER; note = 2'-O-methylcytidine-3'-phosphate
  modified_base 20: mod_base = OTHER; note = 2'-O-methyluridine-3'-phosphate
  modified_base 21: mod_base = OTHER; note = 2'-O-methyluridine-3'-phosphorothioate
  modified_base 22: mod_base = OTHER; note = 2'-O-methyladenosine-3'-phosphorothioate
  modified_base 23: mod_base = OTHER; note = 2'-O-methyladenosine
  misc_feature 1: note = RNA
  misc_feature 3..4: note = RNA
  misc_feature 6: note = RNA
  misc_feature 8..11: note = RNA
  misc_feature 13..23: note = RNA
  misc_feature 2: note = DNA
  misc_feature 5: note = DNA
  misc_feature 7: note = DNA
  misc_feature 12: note = DNA
tcttaacactacgagagacttaa

SEQ ID NO: 1251 - DNA, 23 bp, synthetic construct
  source 1..23: mol_type = other DNA
  modified_base 1: mod_base = OTHER; note = 2'-O-methyluridine-3'-phosphate 5'-(E)-Vinylphosphonate
  modified_base 2: mod_base = OTHER; note = 2'-deoxy-2'-fluorouridine-3'-phosphate
  modified_base 3: mod_base = OTHER; note = 2'-O-methyladenosine-3'-phosphate
  modified_base 4: mod_base = OTHER; note = 2'-O-methyladenosine-3'-phosphate
  modified_base 6: mod_base = OTHER; note = 2'-O-methyluridine-3'-phosphate
  modified_base 7: mod_base = OTHER; note = Thymidine-glycol nucleic acid (GNA), S-Isomer
  modified_base 8: mod_base = OTHER; note = 2'-O-methyladenosine-3'-phosphate
  modified_base 9: mod_base = OTHER; note = 2'-O-methyladenosine-3'-phosphate
  modified_base 10: mod_base = OTHER; note = 2'-O-methylcytidine-3'-phosphate
  modified_base 11: mod_base = OTHER; note = 2'-O-methyladenosine-3'-phosphate
  modified_base 12: mod_base = OTHER; note = 2'-O-methylcytidine-3'-phosphate
  modified_base 13: mod_base = OTHER; note = 2'-O-methyluridine-3'-phosphate
  modified_base 14: mod_base = OTHER; note = 2'-deoxy-2'-fluoroadenosine-3'-phosphate
  modified_base 15: mod_base = OTHER; note = 2'-O-methylcytidine-3'-phosphate
  modified_base 16: mod_base = OTHER; note = 2'-deoxy-2'-fluoroguanosine-3'-phosphate
  modified_base 17: mod_base = OTHER; note = 2'-O-methyladenosine-3'-phosphate
  modified_base 18: mod_base = OTHER; note = 2'-O-methylguanosine-3'-phosphate
  modified_base 19: mod_base = OTHER; note = 2'-O-methyladenosine-3'-phosphate
  modified_base 20: mod_base = OTHER; note = 2'-O-methylguanosine-3'-phosphate
  modified_base 21: mod_base = OTHER; note = 2'-O-methyladenosine-3'-phosphorothioate
  modified_base 22: mod_base = OTHER; note = 2'-O-methylcytidine-3'-phosphorothioate
  modified_base 23: mod_base = OTHER; note = 2'-O-methyluridine
  misc_feature 1..4: note = RNA
  misc_feature 6..23: note = RNA
  misc_feature 5: note = DNA
ttaacttaacactacgagagact

SEQ ID NO: 1252 - DNA, 23 bp, synthetic construct
  source 1..23: mol_type = other DNA
  modified_base 1: mod_base = OTHER; note = 2'-O-methyluridine-3'-phosphate 5'-(E)-Vinylphosphonate
  modified_base 2: mod_base = OTHER; note = 2'-deoxy-2'-fluoroadenosine-3'-phosphate
  modified_base 3: mod_base = OTHER; note = 2'-O-methyluridine-3'-phosphate
  modified_base 4: mod_base = OTHER; note = 2'-O-methyladenosine-3'-phosphate
  modified_base 6: mod_base = OTHER; note = 2'-O-methylcytidine-3'-phosphate
  modified_base 7: mod_base = OTHER; note = Thymidine-glycol nucleic acid (GNA), S-Isomer
  modified_base 8: mod_base = OTHER; note = 2'-O-methyluridine-3'-phosphate
  modified_base 9: mod_base = OTHER; note = 2'-O-methyladenosine-3'-phosphate
  modified_base 10: mod_base = OTHER; note = 2'-O-methyladenosine-3'-phosphate
  modified_base 11: mod_base = OTHER; note = 2'-O-methylcytidine-3'-phosphate
  modified_base 12: mod_base = OTHER; note = 2'-O-methyladenosine-3'-phosphate
  modified_base 13: mod_base = OTHER; note = 2'-O-methylcytidine-3'-phosphate
  modified_base 14: mod_base = OTHER; note = 2'-deoxy-2'-fluorouridine-3'-phosphate
  modified_base 15: mod_base = OTHER; note = 2'-O-methyladenosine-3'-phosphate
  modified_base 16: mod_base = OTHER; note = 2'-deoxy-2'-fluorocytidine-3'-phosphate
  modified_base 17: mod_base = OTHER; note = 2'-O-methylguanosine-3'-phosphate
  modified_base 18: mod_base = OTHER; note = 2'-O-methyladenosine-3'-phosphate
  modified_base 19: mod_base = OTHER; note = 2'-O-methylguanosine-3'-phosphate
  modified_base 20: mod_base = OTHER; note = 2'-O-methyladenosine-3'-phosphate
  modified_base 21: mod_base = OTHER; note = 2'-O-methylguanosine-3'-phosphorothioate
  modified_base 22: mod_base = OTHER; note = 2'-O-methyladenosine-3'-phosphorothioate
  modified_base 23: mod_base = OTHER; note = 2'-O-methylcytidine
  misc_feature 1..4: note = RNA
  misc_feature 6..23: note = RNA
  misc_feature 5: note = DNA
tataacttaacactacgagagac

SEQ ID NO: 1253 - DNA, 23 bp, synthetic construct
  source 1..23: mol_type = other DNA
  modified_base 1: mod_base = OTHER; note = 2'-O-methyluridine-3'-phosphate 5'-(E)-Vinylphosphonate
  modified_base 3: mod_base = OTHER; note = 2'-O-methyluridine-3'-phosphate
  modified_base 4: mod_base = OTHER; note = 2'-O-methyladenosine-3'-phosphate
  modified_base 6: mod_base = OTHER; note = 2'-O-methylcytidine-3'-phosphate
  modified_base 8: mod_base = OTHER; note = 2'-O-methyluridine-3'-phosphate
  modified_base 9: mod_base = OTHER; note = 2'-O-methyladenosine-3'-phosphate
  modified_base 10: mod_base = OTHER; note = 2'-O-methyladenosine-3'-phosphate
  modified_base 11: mod_base = OTHER; note = 2'-O-methylcytidine-3'-phosphate
  modified_base 13: mod_base = OTHER; note = 2'-O-methylcytidine-3'-phosphate
  modified_base 14: mod_base = OTHER; note = 2'-deoxy-2'-fluorouridine-3'-phosphate
  modified_base 15: mod_base = OTHER; note = 2'-O-methyladenosine-3'-phosphate
  modified_base 16: mod_base = OTHER; note = 2'-O-methylcytidine-3'-phosphate
  modified_base 17: mod_base = OTHER; note = 2'-O-methylguanosine-3'-phosphate
  modified_base 18: mod_base = OTHER; note = 2'-O-methyladenosine-3'-phosphate
  modified_base 19: mod_base = OTHER; note = 2'-O-methylguanosine-3'-phosphate
  modified_base 20: mod_base = OTHER; note = 2'-O-methyladenosine-3'-phosphate
  modified_base 21: mod_base = OTHER; note = 2'-O-methylguanosine-3'-phosphorothioate
  modified_base 22: mod_base = OTHER; note = 2'-O-methyladenosine-3'-phosphorothioate
  modified_base 23: mod_base = OTHER; note = 2'-O-methylcytidine
  misc_feature 1: note = RNA
  misc_feature 3..4: note = RNA
  misc_feature 6: note = RNA
  misc_feature 8..11: note = RNA
  misc_feature 13..23: note = RNA
  misc_feature 2: note = DNA
  misc_feature 5: note = DNA
  misc_feature 7: note = DNA
  misc_feature 12: note = DNA
tataacttaacactacgagagac

SEQ ID NO: 1254 - DNA, 23 bp, synthetic construct
  source 1..23: mol_type = other DNA
  modified_base 1: mod_base = OTHER; note = 2'-O-methyluridine-3'-phosphate 5'-(E)-Vinylphosphonate
  modified_base 3: mod_base = OTHER; note = 2'-O-methyluridine-3'-phosphate
  modified_base 4: mod_base = OTHER; note = 2'-O-methyladenosine-3'-phosphate
  modified_base 6: mod_base = OTHER; note = 2'-O-methyladenosine-3'-phosphate
  modified_base 8: mod_base = OTHER; note = 2'-O-methylcytidine-3'-phosphate
  modified_base 9: mod_base = OTHER; note = 2'-O-methyluridine-3'-phosphate
  modified_base 10: mod_base = OTHER; note = 2'-O-methyluridine-3'-phosphate
  modified_base 11: mod_base = OTHER; note = 2'-O-methyladenosine-3'-phosphate
  modified_base 13: mod_base = OTHER; note = 2'-O-methylcytidine-3'-phosphate
  modified_base 14: mod_base = OTHER; note = 2'-deoxy-2'-fluoroadenosine-3'-phosphate
  modified_base 15: mod_base = OTHER; note = 2'-O-methylcytidine-3'-phosphate
  modified_base 16: mod_base = OTHER; note = 2'-O-methyluridine-3'-phosphate
  modified_base 17: mod_base = OTHER; note = 2'-O-methyladenosine-3'-phosphate
  modified_base 18: mod_base = OTHER; note = 2'-O-methylcytidine-3'-phosphate
  modified_base 19: mod_base = OTHER; note = 2'-O-methylguanosine-3'-phosphate
  modified_base 20: mod_base = OTHER; note = 2'-O-methyladenosine-3'-phosphate
  modified_base 21: mod_base = OTHER; note = 2'-O-methylguanosine-3'-phosphorothioate
  modified_base 22: mod_base = OTHER; note = 2'-O-methyladenosine-3'-phosphorothioate
  modified_base 23: mod_base = OTHER; note = 2'-O-methylguanosine
  misc_feature 1: note = RNA
  misc_feature 3..4: note = RNA
  misc_feature 6: note = RNA
  misc_feature 8..11: note = RNA
  misc_feature 13..23: note = RNA
  misc_feature 2: note = DNA
  misc_feature 5: note = DNA
  misc_feature 7: note = DNA
  misc_feature 12: note = DNA
tctataacttaacactacgagag

SEQ ID NO: 1255 - DNA, 23 bp, synthetic construct
  source 1..23: mol_type = other DNA
  modified_base 1: mod_base = OTHER; note = 2'-O-methyluridine-3'-phosphate 5'-(E)-Vinylphosphonate
  modified_base 3: mod_base = OTHER; note = 2'-O-methyladenosine-3'-phosphate
  modified_base 4: mod_base = OTHER; note = 2'-O-methylcytidine-3'-phosphate
  modified_base 6: mod_base = OTHER; note = 2'-O-methyladenosine-3'-phosphate
  modified_base 8: mod_base = OTHER; note = 2'-O-methyladenosine-3'-phosphate
  modified_base 9: mod_base = OTHER; note = 2'-O-methyladenosine-3'-phosphate
  modified_base 10: mod_base = OTHER; note = 2'-O-methylcytidine-3'-phosphate
  modified_base 11: mod_base = OTHER; note = 2'-O-methyluridine-3'-phosphate
  modified_base 13: mod_base = OTHER; note = 2'-O-methyladenosine-3'-phosphate
  modified_base 14: mod_base = OTHER; note = 2'-deoxy-2'-fluoroadenosine-3'-phosphate
  modified_base 15: mod_base = OTHER; note = 2'-O-methylcytidine-3'-phosphate
  modified_base 16: mod_base = OTHER; note = 2'-O-methyladenosine-3'-phosphate
  modified_base 17: mod_base = OTHER; note = 2'-O-methylcytidine-3'-phosphate
  modified_base 18: mod_base = OTHER; note = 2'-O-methyluridine-3'-phosphate
  modified_base 19: mod_base = OTHER; note = 2'-O-methyladenosine-3'-phosphate
  modified_base 20: mod_base = OTHER; note = 2'-O-methylcytidine-3'-phosphate
  modified_base 21: mod_base = OTHER; note = 2'-O-methylguanosine-3'-phosphorothioate
  modified_base 22: mod_base = OTHER; note = 2'-O-methyladenosine-3'-phosphorothioate
  modified_base 23: mod_base = OTHER; note = 2'-O-methylguanosine
  misc_feature 1: note = RNA
  misc_feature 3..4: note = RNA
  misc_feature 6: note = RNA
  misc_feature 8..11: note = RNA
  misc_feature 13..23: note = RNA
  misc_feature 2: note = DNA
  misc_feature 5: note = DNA
  misc_feature 7: note = DNA
  misc_feature 12: note = DNA
tcactataacttaacactacgag

SEQ ID NO: 1256 - DNA, 23 bp, synthetic construct
  source 1..23: mol_type = other DNA
  modified_base 1: mod_base = OTHER; note = 2'-O-methyluridine-3'-phosphate 5'-(E)-Vinylphosphonate
  modified_base 2: mod_base = OTHER; note = 2'-deoxy-2'-fluorouridine-3'-phosphate
  modified_base 3: mod_base = OTHER; note = 2'-O-methyluridine-3'-phosphate
  modified_base 4: mod_base = OTHER; note = 2'-O-methylcytidine-3'-phosphate
  modified_base 6: mod_base = OTHER; note = 2'-O-methylcytidine-3'-phosphate
  modified_base 7: mod_base = OTHER; note = Thymidine-glycol nucleic acid (GNA), S-Isomer
  modified_base 8: mod_base = OTHER; note = 2'-O-methyladenosine-3'-phosphate
  modified_base 9: mod_base = OTHER; note = 2'-O-methyluridine-3'-phosphate
  modified_base 10: mod_base = OTHER; note = 2'-O-methyladenosine-3'-phosphate
  modified_base 11: mod_base = OTHER; note = 2'-O-methyladenosine-3'-phosphate
  modified_base 12: mod_base = OTHER; note = 2'-O-methylcytidine-3'-phosphate
  modified_base 13: mod_base = OTHER; note = 2'-O-methyluridine-3'-phosphate
  modified_base 14: mod_base = OTHER; note = 2'-deoxy-2'-fluorouridine-3'-phosphate
  modified_base 15: mod_base = OTHER; note = 2'-O-methyladenosine-3'-phosphate
  modified_base 16: mod_base = OTHER; note = 2'-deoxy-2'-fluoroadenosine-3'-phosphate
  modified_base 17: mod_base = OTHER; note = 2'-O-methylcytidine-3'-phosphate
  modified_base 18: mod_base = OTHER; note = 2'-O-methyladenosine-3'-phosphate
  modified_base 19: mod_base = OTHER; note = 2'-O-methylcytidine-3'-phosphate
  modified_base 20: mod_base = OTHER; note = 2'-O-methyluridine-3'-phosphate
  modified_base 21: mod_base = OTHER; note = 2'-O-methyladenosine-3'-phosphorothioate
  modified_base 22: mod_base = OTHER; note = 2'-O-methylcytidine-3'-phosphorothioate
  modified_base 23: mod_base = OTHER; note = 2'-O-methylguanosine
  misc_feature 1..4: note = RNA
  misc_feature 6..23: note = RNA
  misc_feature 5: note = DNA
tttcactataacttaacactacg

SEQ ID NO: 1257 - DNA, 23 bp, synthetic construct
  source 1..23: mol_type = other DNA
  modified_base 1: mod_base = OTHER; note = 2'-O-methyluridine-3'-phosphate 5'-(E)-Vinylphosphonate
  modified_base 2: mod_base = OTHER; note = 2'-deoxy-2'-fluoroadenosine-3'-phosphate
  modified_base 3: mod_base = OTHER; note = 2'-O-methyluridine-3'-phosphate
  modified_base 4: mod_base = OTHER; note = 2'-O-methyluridine-3'-phosphate
  modified_base 6: mod_base = OTHER; note = 2'-O-methylcytidine-3'-phosphate
  modified_base 7: mod_base = OTHER; note = Thymidine-glycol nucleic acid (GNA), S-Isomer
  modified_base 8: mod_base = OTHER; note = 2'-O-methylguanosine-3'-phosphate
  modified_base 9: mod_base = OTHER; note = 2'-O-methyluridine-3'-phosphate
  modified_base 10: mod_base = OTHER; note = 2'-O-methyladenosine-3'-phosphate
  modified_base 11: mod_base = OTHER; note = 2'-O-methylguanosine-3'-phosphate
  modified_base 12: mod_base = OTHER; note = 2'-O-methylcytidine-3'-phosphate
  modified_base 13: mod_base = OTHER; note = 2'-O-methyladenosine-3'-phosphate
  modified_base 14: mod_base = OTHER; note = 2'-deoxy-2'-fluoroguanosine-3'-phosphate
  modified_base 15: mod_base = OTHER; note = 2'-O-methyluridine-3'-phosphate
  modified_base 16: mod_base = OTHER; note = 2'-deoxy-2'-fluoroadenosine-3'-phosphate
  modified_base 17: mod_base = OTHER; note = 2'-O-methyluridine-3'-phosphate
  modified_base 18: mod_base = OTHER; note = 2'-O-methyluridine-3'-phosphate
  modified_base 19: mod_base = OTHER; note = 2'-O-methylcytidine-3'-phosphate
  modified_base 20: mod_base = OTHER; note = 2'-O-methyladenosine-3'-phosphate
  modified_base 21: mod_base = OTHER; note = 2'-O-methylcytidine-3'-phosphorothioate
  modified_base 22: mod_base = OTHER; note = 2'-O-methyluridine-3'-phosphorothioate
  modified_base 23: mod_base = OTHER; note = 2'-O-methyladenosine
  misc_feature 1..4: note = RNA
  misc_feature 6..23: note = RNA
  misc_feature 5: note = DNA
tattgctgtagcagtattcacta

SEQ ID NO: 1258 - DNA, 23 bp, synthetic construct
  source 1..23: mol_type = other DNA
  modified_base 1: mod_base = OTHER; note = 2'-O-methyluridine-3'-phosphate 5'-(E)-Vinylphosphonate
  modified_base 3: mod_base = OTHER; note = 2'-O-methyluridine-3'-phosphate
  modified_base 4: mod_base = OTHER; note = 2'-O-methyluridine-3'-phosphate
  modified_base 6: mod_base = OTHER; note = 2'-O-methylguanosine-3'-phosphate
  modified_base 8: mod_base = OTHER; note = 2'-O-methyladenosine-3'-phosphate
  modified_base 9: mod_base = OTHER; note = 2'-O-methyladenosine-3'-phosphate
  modified_base 10: mod_base = OTHER; note = 2'-O-methyluridine-3'-phosphate
  modified_base 11: mod_base = OTHER; note = 2'-O-methyluridine-3'-phosphate
  modified_base 13: mod_base = OTHER; note = 2'-O-methylcytidine-3'-phosphate
  modified_base 14: mod_base = OTHER; note = 2'-deoxy-2'-fluorouridine-3'-phosphate
  modified_base 15: mod_base = OTHER; note = 2'-O-methylguanosine-3'-phosphate
  modified_base 16: mod_base = OTHER; note = 2'-O-methyluridine-3'-phosphate
  modified_base 17: mod_base = OTHER; note = 2'-O-methyladenosine-3'-phosphate
  modified_base 18: mod_base = OTHER; note = 2'-O-methylguanosine-3'-phosphate
  modified_base 19: mod_base = OTHER; note = 2'-O-methylcytidine-3'-phosphate
  modified_base 20: mod_base = OTHER; note = 2'-O-methyladenosine-3'-phosphate
  modified_base 21: mod_base = OTHER; note = 2'-O-methylguanosine-3'-phosphorothioate
  modified_base 22: mod_base = OTHER; note = 2'-O-methyluridine-3'-phosphorothioate
  modified_base 23: mod_base = OTHER; note = 2'-O-methyladenosine
  misc_feature 1: note = RNA
  misc_feature 3..4: note = RNA
  misc_feature 6: note = RNA
  misc_feature 8..11: note = RNA
  misc_feature 13..23: note = RNA
  misc_feature 2: note = DNA
  misc_feature 5: note = DNA
  misc_feature 7: note = DNA
  misc_feature 12: note = DNA
tattagaaattgctgtagcagta

SEQ ID NO: 1259 - DNA, 23 bp, synthetic construct
  source 1..23: mol_type = other DNA
  modified_base 1: mod_base = OTHER; note = 2'-O-methyluridine-3'-phosphate 5'-(E)-Vinylphosphonate
  modified_base 2: mod_base = OTHER; note = 2'-deoxy-2'-fluorouridine-3'-phosphate
  modified_base 3: mod_base = OTHER; note = 2'-O-methylcytidine-3'-phosphate
  modified_base 4: mod_base = OTHER; note = 2'-O-methyluridine-3'-phosphate
  modified_base 6: mod_base = OTHER; note = 2'-O-methylcytidine-3'-phosphate
  modified_base 7: mod_base = OTHER; note = Adenosine-glycol nucleic acid (GNA), S-isomer
  modified_base 8: mod_base = OTHER; note = 2'-O-methylcytidine-3'-phosphate
  modified_base 9: mod_base = OTHER; note = 2'-O-methylcytidine-3'-phosphate
  modified_base 10: mod_base = OTHER; note = 2'-O-methyladenosine-3'-phosphate
  modified_base 11: mod_base = OTHER; note = 2'-O-methyluridine-3'-phosphate
  modified_base 12: mod_base = OTHER; note = 2'-O-methyluridine-3'-phosphate
  modified_base 13: mod_base = OTHER; note = 2'-O-methyladenosine-3'-phosphate
  modified_base 14: mod_base = OTHER; note = 2'-deoxy-2'-fluorocytidine-3'-phosphate
  modified_base 15: mod_base = OTHER; note = 2'-O-methyluridine-3'-phosphate
  modified_base 16: mod_base = OTHER; note = 2'-deoxy-2'-fluorocytidine-3'-phosphate
  modified_base 17: mod_base = OTHER; note = 2'-O-methyladenosine-3'-phosphate
  modified_base 18: mod_base = OTHER; note = 2'-O-methyladenosine-3'-phosphate
  modified_base 19: mod_base = OTHER; note = 2'-O-methyluridine-3'-phosphate
  modified_base 20: mod_base = OTHER; note = 2'-O-methyluridine-3'-phosphate
  modified_base 21: mod_base = OTHER; note = 2'-O-methylcytidine-3'-phosphorothioate
  modified_base 22: mod_base = OTHER; note = 2'-O-methyluridine-3'-phosphorothioate
  modified_base 23: mod_base = OTHER; note = 2'-O-methyluridine
  misc_feature 1..4: note = RNA
  misc_feature 6..23: note = RNA
  misc_feature 5: note = DNA
ttctacaccattactcaattctt

SEQ ID NO: 1260 - DNA, 23 bp, synthetic construct
  source 1..23: mol_type = other DNA
  modified_base 1: mod_base = OTHER; note = 2'-O-methyluridine-3'-phosphate 5'-(E)-Vinylphosphonate
  modified_base 2: mod_base = OTHER; note = 2'-deoxy-2'-fluorouridine-3'-phosphate
  modified_base 3: mod_base = OTHER; note = 2'-O-methylguanosine-3'-phosphate
  modified_base 4: mod_base = OTHER; note = 2'-O-methyluridine-3'-phosphate
  modified_base 6: mod_base = OTHER; note = 2'-O-methylcytidine-3'-phosphate
  modified_base 7: mod_base = OTHER; note = Thymidine-glycol nucleic acid (GNA), S-Isomer
  modified_base 8: mod_base = OTHER; note = 2'-O-methyladenosine-3'-phosphate
  modified_base 9: mod_base = OTHER; note = 2'-O-methylcytidine-3'-phosphate
  modified_base 10: mod_base = OTHER; note = 2'-O-methyladenosine-3'-phosphate
  modified_base 11: mod_base = OTHER; note = 2'-O-methylcytidine-3'-phosphate
  modified_base 12: mod_base = OTHER; note = 2'-O-methylcytidine-3'-phosphate
  modified_base 13: mod_base = OTHER; note = 2'-O-methyladenosine-3'-phosphate
  modified_base 14: mod_base = OTHER; note = 2'-deoxy-2'-fluorouridine-3'-phosphate
  modified_base 15: mod_base = OTHER; note = 2'-O-methyluridine-3'-phosphate
  modified_base 16: mod_base = OTHER; note = 2'-deoxy-2'-fluoroadenosine-3'-phosphate
  modified_base 17: mod_base = OTHER; note = 2'-O-methylcytidine-3'-phosphate
  modified_base 18: mod_base = OTHER; note = 2'-O-methyluridine-3'-phosphate
  modified_base 19: mod_base = OTHER; note = 2'-O-methylcytidine-3'-phosphate
  modified_base 20: mod_base = OTHER; note = 2'-O-methyladenosine-3'-phosphate
  modified_base 21: mod_base = OTHER; note = 2'-O-methyladenosine-3'-phosphorothioate
  modified_base 22: mod_base = OTHER; note = 2'-O-methyluridine-3'-phosphorothioate
  modified_base 23: mod_base = OTHER; note = 2'-O-methyluridine
  misc_feature 1..4: note = RNA
  misc_feature 6..23: note = RNA
  misc_feature 5: note = DNA
ttgttctacaccattactcaatt

SEQ ID NO: 1261 - DNA, 23 bp, synthetic construct
  source 1..23: mol_type = other DNA
  modified_base 1: mod_base = OTHER; note = 2'-O-methyluridine-3'-phosphate 5'-(E)-Vinylphosphonate
  modified_base 2: mod_base = OTHER; note = 2'-deoxy-2'-fluoroadenosine-3'-phosphate
  modified_base 3: mod_base = OTHER; note = 2'-O-methylguanosine-3'-phosphate
  modified_base 4: mod_base = OTHER; note = 2'-O-methyluridine-3'-phosphate
  modified_base 6: mod_base = OTHER; note = 2'-O-methyluridine-3'-phosphate
  modified_base 7: mod_base = OTHER; note = Thymidine-glycol nucleic acid (GNA), S-Isomer
  modified_base 8: mod_base = OTHER; note = 2'-O-methylcytidine-3'-phosphate
  modified_base 9: mod_base = OTHER; note = 2'-O-methyluridine-3'-phosphate
  modified_base 10: mod_base = OTHER; note = 2'-O-methyladenosine-3'-phosphate
  modified_base 11: mod_base = OTHER; note = 2'-O-methylcytidine-3'-phosphate
  modified_base 12: mod_base = OTHER; note = 2'-O-methyladenosine-3'-phosphate
  modified_base 13: mod_base = OTHER; note = 2'-O-methylcytidine-3'-phosphate
  modified_base 14: mod_base = OTHER; note = 2'-deoxy-2'-fluorocytidine-3'-phosphate
  modified_base 15: mod_base = OTHER; note = 2'-O-methyladenosine-3'-phosphate
  modified_base 16: mod_base = OTHER; note = 2'-deoxy-2'-fluorouridine-3'-phosphate
  modified_base 17: mod_base = OTHER; note = 2'-O-methyluridine-3'-phosphate
  modified_base 18: mod_base = OTHER; note = 2'-O-methyladenosine-3'-phosphate
  modified_base 19: mod_base = OTHER; note = 2'-O-methylcytidine-3'-phosphate
  modified_base 20: mod_base = OTHER; note = 2'-O-methyluridine-3'-phosphate
  modified_base 21: mod_base = OTHER; note = 2'-O-methylcytidine-3'-phosphorothioate
  modified_base 22: mod_base = OTHER; note = 2'-O-methyladenosine-3'-phosphorothioate
  modified_base 23: mod_base = OTHER; note = 2'-O-methyladenosine
  misc_feature 1..4: note = RNA
  misc_feature 6..23: note = RNA
  misc_feature 5: note = DNA
tagtgttctacaccattactcaa

SEQ ID NO: 1262 - DNA, 23 bp, synthetic construct
  source 1..23: mol_type = other DNA
  modified_base 1: mod_base = OTHER; note = 2'-O-methyluridine-3'-phosphate 5'-(E)-Vinylphosphonate
  modified_base 2: mod_base = OTHER; note = 2'-deoxy-2'-fluorouridine-3'-phosphate
  modified_base 3: mod_base = OTHER; note = 2'-O-methyladenosine-3'-phosphate
  modified_base 4: mod_base = OTHER; note = 2'-O-methylguanosine-3'-phosphate
  modified_base 6: mod_base = OTHER; note = 2'-O-methylguanosine-3'-phosphate
  modified_base 7: mod_base = OTHER; note = Thymidine-glycol nucleic acid (GNA), S-Isomer
  modified_base 8: mod_base = OTHER; note = 2'-O-methyluridine-3'-phosphate
  modified_base 9: mod_base = OTHER; note = 2'-O-methylcytidine-3'-phosphate
  modified_base 10: mod_base = OTHER; note = 2'-O-methyluridine-3'-phosphate
  modified_base 11: mod_base = OTHER; note = 2'-O-methyladenosine-3'-phosphate
  modified_base 12: mod_base = OTHER; note = 2'-O-methylcytidine-3'-phosphate
  modified_base 13: mod_base = OTHER; note = 2'-O-methyladenosine-3'-phosphate
  modified_base 14: mod_base = OTHER; note = 2'-deoxy-2'-fluorocytidine-3'-phosphate
  modified_base 15: mod_base = OTHER; note = 2'-O-methylcytidine-3'-phosphate
  modified_base 16: mod_base = OTHER; note = 2'-deoxy-2'-fluoroadenosine-3'-phosphate
  modified_base 17: mod_base = OTHER; note = 2'-O-methyluridine-3'-phosphate
  modified_base 18: mod_base = OTHER; note = 2'-O-methyluridine-3'-phosphate
  modified_base 19: mod_base = OTHER; note = 2'-O-methyladenosine-3'-phosphate
  modified_base 20: mod_base = OTHER; note = 2'-O-methylcytidine-3'-phosphate
  modified_base 21: mod_base = OTHER; note = 2'-O-methyluridine-3'-phosphorothioate
  modified_base 22: mod_base = OTHER; note = 2'-O-methylcytidine-3'-phosphorothioate
  modified_base 23: mod_base = OTHER; note = 2'-O-methyladenosine
  misc_feature 1..4: note = RNA
  misc_feature 6..23: note = RNA
  misc_feature 5: note = DNA
ttagtgttctacaccattactca

SEQ ID NO: 1263 - DNA, 23 bp, synthetic construct
  source 1..23: mol_type = other DNA
  modified_base 1: mod_base = OTHER; note = 2'-O-methyluridine-3'-phosphate 5'-(E)-Vinylphosphonate
  modified_base 2: mod_base = OTHER; note = 2'-deoxy-2'-fluoroadenosine-3'-phosphate
  modified_base 3: mod_base = OTHER; note = 2'-O-methyluridine-3'-phosphate
  modified_base 4: mod_base = OTHER; note = 2'-O-methyluridine-3'-phosphate
  modified_base 6: mod_base = OTHER; note = 2'-O-methylguanosine-3'-phosphate
  modified_base 7: mod_base = OTHER; note = Thymidine-glycol nucleic acid (GNA), S-Isomer
  modified_base 8: mod_base = OTHER; note = 2'-O-methylguanosine-3'-phosphate
  modified_base 9: mod_base = OTHER; note = 2'-O-methyluridine-3'-phosphate
  modified_base 10: mod_base = OTHER; note = 2'-O-methyluridine-3'-phosphate
  modified_base 11: mod_base = OTHER; note = 2'-O-methylcytidine-3'-phosphate
  modified_base 12: mod_base = OTHER; note = 2'-O-methyluridine-3'-phosphate
  modified_base 13: mod_base = OTHER; note = 2'-O-methyladenosine-3'-phosphate
  modified_base 14: mod_base = OTHER; note = 2'-deoxy-2'-fluorocytidine-3'-phosphate
  modified_base 15: mod_base = OTHER; note = 2'-O-methyladenosine-3'-phosphate
  modified_base 16: mod_base = OTHER; note = 2'-deoxy-2'-fluorocytidine-3'-phosphate
  modified_base 17: mod_base = OTHER; note = 2'-O-methylcytidine-3'-phosphate
  modified_base 18: mod_base = OTHER; note = 2'-O-methyladenosine-3'-phosphate
  modified_base 19: mod_base = OTHER; note = 2'-O-methyluridine-3'-phosphate
  modified_base 20: mod_base = OTHER; note = 2'-O-methyluridine-3'-phosphate
  modified_base 21: mod_base = OTHER; note = 2'-O-methyladenosine-3'-phosphorothioate
  modified_base 22: mod_base = OTHER; note = 2'-O-methylcytidine-3'-phosphorothioate
  modified_base 23: mod_base = OTHER; note = 2'-O-methyluridine
  misc_feature 1..4: note = RNA
  misc_feature 6..23: note = RNA
  misc_feature 5: note = DNA
tattagtgttctacaccattact

SEQ ID NO: 1264 - DNA, 23 bp, synthetic construct
  source 1..23: mol_type = other DNA
  modified_base 1: mod_base = OTHER; note = 2'-O-methyluridine-3'-phosphate 5'-(E)-Vinylphosphonate
  modified_base 3: mod_base = OTHER; note = 2'-O-methyladenosine-3'-phosphate
  modified_base 4: mod_base = OTHER; note = 2'-O-methyladenosine-3'-phosphate
  modified_base 6: mod_base = OTHER; note = 2'-O-methyluridine-3'-phosphate
  modified_base 8: mod_base = OTHER; note = 2'-O-methylguanosine-3'-phosphate
  modified_base 9: mod_base = OTHER; note = 2'-O-methyluridine-3'-phosphate
  modified_base 10: mod_base = OTHER; note = 2'-O-methylguanosine-3'-phosphate
  modified_base 11: mod_base = OTHER; note = 2'-O-methyluridine-3'-phosphate
  modified_base 13: mod_base = OTHER; note = 2'-O-methylcytidine-3'-phosphate
  modified_base 14: mod_base = OTHER; note = 2'-deoxy-2'-fluorouridine-3'-phosphate
  modified_base 15: mod_base = OTHER; note = 2'-O-methyladenosine-3'-phosphate
  modified_base 16: mod_base = OTHER; note = 2'-O-methylcytidine-3'-phosphate
  modified_base 17: mod_base = OTHER; note = 2'-O-methyladenosine-3'-phosphate
  modified_base 18: mod_base = OTHER; note = 2'-O-methylcytidine-3'-phosphate
  modified_base 19: mod_base = OTHER; note = 2'-O-methylcytidine-3'-phosphate
  modified_base 20: mod_base = OTHER; note = 2'-O-methyladenosine-3'-phosphate
  modified_base 21: mod_base = OTHER; note = 2'-O-methyluridine-3'-phosphorothioate
  modified_base 22: mod_base = OTHER; note = 2'-O-methyluridine-3'-phosphorothioate
  modified_base 23: mod_base = OTHER; note = 2'-O-methyladenosine
  misc_feature 1: note = RNA
  misc_feature 3..4: note = RNA
  misc_feature 6: note = RNA
  misc_feature 8..11: note = RNA
  misc_feature 13..23: note = RNA
  misc_feature 2: note = DNA
  misc_feature 5: note = DNA
  misc_feature 7: note = DNA
  misc_feature 12: note = DNA
tgaattagtgttctacaccatta

SEQ ID NO: 1265 - DNA, 23 bp, synthetic construct
  source 1..23: mol_type = other DNA
  modified_base 1: mod_base = OTHER; note = 2'-O-methyluridine-3'-phosphate 5'-(E)-Vinylphosphonate
  modified_base 3: mod_base = OTHER; note = 2'-O-methylguanosine-3'-phosphate
  modified_base 4: mod_base = OTHER; note = 2'-O-methyladenosine-3'-phosphate
  modified_base 6: mod_base = OTHER; note = 2'-O-methyluridine-3'-phosphate
  modified_base 8: mod_base = OTHER; note = 2'-O-methyladenosine-3'-phosphate
  modified_base 9: mod_base = OTHER; note = 2'-O-methylguanosine-3'-phosphate
  modified_base 10: mod_base = OTHER; note = 2'-O-methyluridine-3'-phosphate
  modified_base 11: mod_base = OTHER; note = 2'-O-methylguanosine-3'-phosphate
  modified_base 13: mod_base = OTHER; note = 2'-O-methyluridine-3'-phosphate
  modified_base 14: mod_base = OTHER; note = 2'-deoxy-2'-fluorocytidine-3'-phosphate
  modified_base 15: mod_base = OTHER; note = 2'-O-methyluridine-3'-phosphate
  modified_base 16: mod_base = OTHER; note = 2'-O-methyladenosine-3'-phosphate
  modified_base 17: mod_base = OTHER; note = 2'-O-methylcytidine-3'-phosphate
  modified_base 18: mod_base = OTHER; note = 2'-O-methyladenosine-3'-phosphate
  modified_base 19: mod_base = OTHER; note = 2'-O-methylcytidine-3'-phosphate
  modified_base 20: mod_base = OTHER; note = 2'-O-methylcytidine-3'-phosphate
  modified_base 21: mod_base = OTHER; note = 2'-O-methyladenosine-3'-phosphorothioate
  modified_base 22: mod_base = OTHER; note = 2'-O-methyluridine-3'-phosphorothioate
  modified_base 23: mod_base = OTHER; note = 2'-O-methyluridine
  misc_feature 1: note = RNA
  misc_feature 3..4: note = RNA
  misc_feature 6: note = RNA
  misc_feature 8..11: note = RNA
  misc_feature 13..23: note = RNA
  misc_feature 2: note = DNA
  misc_feature 5: note = DNA
  misc_feature 7: note = DNA
  misc_feature 12: note = DNA
ttgaattagtgttctacaccatt

SEQ ID NO: 1266 - DNA, 23 bp, synthetic construct
  source 1..23: mol_type = other DNA
  modified_base 1: mod_base = OTHER; note = 2'-O-methyluridine-3'-phosphate 5'-(E)-Vinylphosphonate
  modified_base 3: mod_base = OTHER; note = 2'-O-methyluridine-3'-phosphate
  modified_base 4: mod_base = OTHER; note = 2'-O-methylguanosine-3'-phosphate
  modified_base 6: mod_base = OTHER; note = 2'-O-methyladenosine-3'-phosphate
  modified_base 8: mod_base = OTHER; note = 2'-O-methyluridine-3'-phosphate
  modified_base 9: mod_base = OTHER; note = 2'-O-methyladenosine-3'-phosphate
  modified_base 10: mod_base = OTHER; note = 2'-O-methylguanosine-3'-phosphate
  modified_base 11: mod_base = OTHER; note = 2'-O-methyluridine-3'-phosphate
  modified_base 13: mod_base = OTHER; note = 2'-O-methyluridine-3'-phosphate
  modified_base 14: mod_base = OTHER; note = 2'-deoxy-2'-fluorouridine-3'-phosphate
  modified_base 15: mod_base = OTHER; note = 2'-O-methylcytidine-3'-phosphate
  modified_base 16: mod_base = OTHER; note = 2'-O-methyluridine-3'-phosphate
  modified_base 17: mod_base = OTHER; note = 2'-O-methyladenosine-3'-phosphate
  modified_base 18: mod_base = OTHER; note = 2'-O-methylcytidine-3'-phosphate
  modified_base 19: mod_base = OTHER; note = 2'-O-methyladenosine-3'-phosphate
  modified_base 20: mod_base = OTHER; note = 2'-O-methylcytidine-3'-phosphate
  modified_base 21: mod_base = OTHER; note = 2'-O-methylcytidine-3'-phosphorothioate
  modified_base 22: mod_base = OTHER; note = 2'-O-methyladenosine-3'-phosphorothioate
  modified_base 23: mod_base = OTHER; note = 2'-O-methyluridine
  misc_feature 1: note = RNA
  misc_feature 3..4: note = RNA
  misc_feature 6: note = RNA
  misc_feature 8..11: note = RNA
  misc_feature 13..23: note = RNA
  misc_feature 2: note = DNA
  misc_feature 5: note = DNA
  misc_feature 7: note = DNA
  misc_feature 12: note = DNA
tatgaattagtgttctacaccat

SEQ ID NO: 1267 - DNA, 23 bp, synthetic construct
  source 1..23: mol_type = other DNA
  modified_base 1: mod_base = OTHER; note = 2'-O-methyluridine-3'-phosphate 5'-(E)-Vinylphosphonate
  modified_base 2: mod_base = OTHER; note = 2'-deoxy-2'-fluorouridine-3'-phosphate
  modified_base 3: mod_base = OTHER; note = 2'-O-methyladenosine-3'-phosphate
  modified_base 4: mod_base = OTHER; note = 2'-O-methyluridine-3'-phosphate
  modified_base 6: mod_base = OTHER; note = 2'-O-methyladenosine-3'-phosphate
  modified_base 7: mod_base = OTHER; note = Adenosine-glycol nucleic acid (GNA), S-isomer
  modified_base 8: mod_base = OTHER; note = 2'-O-methyluridine-3'-phosphate
  modified_base 9: mod_base = OTHER; note = 2'-O-methyluridine-3'-phosphate
  modified_base 10: mod_base = OTHER; note = 2'-O-methyladenosine-3'-phosphate
  modified_base 11: mod_base = OTHER; note = 2'-O-methylguanosine-3'-phosphate
  modified_base 12: mod_base = OTHER; note = 2'-O-methyluridine-3'-phosphate
  modified_base 13: mod_base = OTHER; note = 2'-O-methylguanosine-3'-phosphate
  modified_base 14: mod_base = OTHER; note = 2'-deoxy-2'-fluorouridine-3'-phosphate
  modified_base 15: mod_base = OTHER; note = 2'-O-methyluridine-3'-phosphate
  modified_base 16: mod_base = OTHER; note = 2'-deoxy-2'-fluorocytidine-3'-phosphate
  modified_base 17: mod_base = OTHER; note = 2'-O-methyluridine-3'-phosphate
  modified_base 18: mod_base = OTHER; note = 2'-O-methyladenosine-3'-phosphate
  modified_base 19: mod_base = OTHER; note = 2'-O-methylcytidine-3'-phosphate
  modified_base 20: mod_base = OTHER; note = 2'-O-methyladenosine-3'-phosphate
  modified_base 21: mod_base = OTHER; note = 2'-O-methylcytidine-3'-phosphorothioate
  modified_base 22: mod_base = OTHER; note = 2'-O-methylcytidine-3'-phosphorothioate
  modified_base 23: mod_base = OTHER; note = 2'-O-methyladenosine
  misc_feature 1..4: note = RNA
  misc_feature 6..23: note = RNA
  misc_feature 5: note = DNA
ttatgaattagtgttctacacca

SEQ ID NO: 1268 - DNA, 23 bp, synthetic construct
  source 1..23: mol_type = other DNA
  modified_base 1: mod_base = OTHER; note = 2'-O-methyluridine-3'-phosphate 5'-(E)-Vinylphosphonate
  modified_base 2: mod_base = OTHER; note = 2'-deoxy-2'-fluorouridine-3'-phosphate
  modified_base 3: mod_base = OTHER; note = 2'-O-methyluridine-3'-phosphate
  modified_base 4: mod_base = OTHER; note = 2'-O-methyladenosine-3'-phosphate
  modified_base 6: mod_base = OTHER; note = 2'-O-methylguanosine-3'-phosphate
  modified_base 7: mod_base = OTHER; note = Adenosine-glycol nucleic acid (GNA), S-isomer
  modified_base 8: mod_base = OTHER; note = 2'-O-methyladenosine-3'-phosphate
  modified_base 9: mod_base = OTHER; note = 2'-O-methyluridine-3'-phosphate
  modified_base 10: mod_base = OTHER; note = 2'-O-methyluridine-3'-phosphate
  modified_base 11: mod_base = OTHER; note = 2'-O-methyladenosine-3'-phosphate
  modified_base 12: mod_base = OTHER; note = 2'-O-methylguanosine-3'-phosphate
  modified_base 13: mod_base = OTHER; note = 2'-O-methyluridine-3'-phosphate
  modified_base 14: mod_base = OTHER; note = 2'-deoxy-2'-fluoroguanosine-3'-phosphate
  modified_base 15: mod_base = OTHER; note = 2'-O-methyluridine-3'-phosphate
  modified_base 16: mod_base = OTHER; note = 2'-deoxy-2'-fluorouridine-3'-phosphate
  modified_base 17: mod_base = OTHER; note = 2'-O-methylcytidine-3'-phosphate
  modified_base 18: mod_base = OTHER; note = 2'-O-methyluridine-3'-phosphate
  modified_base 19: mod_base = OTHER; note = 2'-O-methyladenosine-3'-phosphate
  modified_base 20: mod_base = OTHER; note = 2'-O-methylcytidine-3'-phosphate
  modified_base 21: mod_base = OTHER; note = 2'-O-methyladenosine-3'-phosphorothioate
  modified_base 22: mod_base = OTHER; note = 2'-O-methylcytidine-3'-phosphorothioate
  modified_base 23: mod_base = OTHER; note = 2'-O-methylcytidine
  misc_feature 1..4: note = RNA
  misc_feature 6..23: note = RNA
  misc_feature 5: note = DNA
tttatgaattagtgttctacacc

SEQ ID NO: 1269 - DNA, 23 bp, synthetic construct
  source 1..23: mol_type = other DNA
  modified_base 1: mod_base = OTHER; note = 2'-O-methyluridine-3'-phosphate 5'-(E)-Vinylphosphonate
  modified_base 3: mod_base = OTHER; note = 2'-O-methyluridine-3'-phosphate
  modified_base 4: mod_base = OTHER; note = 2'-O-methyluridine-3'-phosphate
  modified_base 6: mod_base = OTHER; note = 2'-O-methyluridine-3'-phosphate
  modified_base 8: mod_base = OTHER; note = 2'-O-methyladenosine-3'-phosphate
  modified_base 9: mod_base = OTHER; note = 2'-O-methyladenosine-3'-phosphate
  modified_base 10: mod_base = OTHER; note = 2'-O-methyluridine-3'-phosphate
  modified_base 11: mod_base = OTHER; note = 2'-O-methyluridine-3'-phosphate
  modified_base 13: mod_base = OTHER; note = 2'-O-methylguanosine-3'-phosphate
  modified_base 14: mod_base = OTHER; note = 2'-deoxy-2'-fluorouridine-3'-phosphate
  modified_base 15: mod_base = OTHER; note = 2'-O-methylguanosine-3'-phosphate
  modified_base 16: mod_base = OTHER; note = 2'-O-methyluridine-3'-phosphate
  modified_base 17: mod_base = OTHER; note = 2'-O-methyluridine-3'-phosphate
  modified_base 18: mod_base = OTHER; note = 2'-O-methylcytidine-3'-phosphate
  modified_base 19: mod_base = OTHER; note = 2'-O-methyluridine-3'-phosphate
  modified_base 20: mod_base = OTHER; note = 2'-O-methyladenosine-3'-phosphate
  modified_base 21: mod_base = OTHER; note = 2'-O-methylcytidine-3'-phosphorothioate
  modified_base 22: mod_base = OTHER; note = 2'-O-methyladenosine-3'-phosphorothioate
  modified_base 23: mod_base = OTHER; note = 2'-O-methylcytidine
  misc_feature 1: note = RNA
  misc_feature 3..4: note = RNA
  misc_feature 6: note = RNA
  misc_feature 8..11: note = RNA
  misc_feature 13..23: note = RNA
  misc_feature 2: note = DNA
  misc_feature 5: note = DNA
  misc_feature 7: note = DNA
  misc_feature 12: note = DNA
tattatgaattagtgttctacac

SEQ ID NO: 1270 - DNA, 23 bp, synthetic construct
  source 1..23: mol_type = other DNA
  modified_base 1: mod_base = OTHER; note = 2'-O-methyluridine-3'-phosphate 5'-(E)-Vinylphosphonate
  modified_base 3: mod_base = OTHER; note = 2'-O-methyladenosine-3'-phosphate
  modified_base 4: mod_base = OTHER; note = 2'-O-methyluridine-3'-phosphate
  modified_base 6: mod_base = OTHER; note = 2'-O-methyladenosine-3'-phosphate
  modified_base 8: mod_base = OTHER; note = 2'-O-methylguanosine-3'-phosphate
  modified_base 9: mod_base = OTHER; note = 2'-O-methyladenosine-3'-phosphate
  modified_base 10: mod_base = OTHER; note = 2'-O-methyladenosine-3'-phosphate
  modified_base 11: mod_base = OTHER; note = 2'-O-methyluridine-3'-phosphate
  modified_base 13: mod_base = OTHER; note = 2'-O-methyladenosine-3'-phosphate
  modified_base 14: mod_base = OTHER; note = 2'-deoxy-2'-fluoroguanosine-3'-phosphate
  modified_base 15: mod_base = OTHER; note = 2'-O-methyluridine-3'-phosphate
  modified_base 16: mod_base = OTHER; note = 2'-O-methylguanosine-3'-phosphate
  modified_base 17: mod_base = OTHER; note = 2'-O-methyluridine-3'-phosphate
  modified_base 18: mod_base = OTHER; note = 2'-O-methyluridine-3'-phosphate
  modified_base 19: mod_base = OTHER; note = 2'-O-methylcytidine-3'-phosphate
  modified_base 20: mod_base = OTHER; note = 2'-O-methyluridine-3'-phosphate
  modified_base 21: mod_base = OTHER; note = 2'-O-methyladenosine-3'-phosphorothioate
  modified_base 22: mod_base = OTHER; note = 2'-O-methylcytidine-3'-phosphorothioate
  modified_base 23: mod_base = OTHER; note = 2'-O-methyladenosine
  misc_feature 1: note = RNA
  misc_feature 3..4: note = RNA
  misc_feature 6: note = RNA
  misc_feature 8..11: note = RNA
  misc_feature 13..23: note = RNA
  misc_feature 2: note = DNA
  misc_feature 5: note = DNA
  misc_feature 7: note = DNA
  misc_feature 12: note = DNA
tgattatgaattagtgttctaca

SEQ ID NO: 1271 - DNA, 23 bp, synthetic construct
  source 1..23: mol_type = other DNA
  modified_base 1: mod_base = OTHER; note = 2'-O-methyluridine-3'-phosphate 5'-(E)-Vinylphosphonate
  modified_base 3: mod_base = OTHER; note = 2'-O-methylguanosine-3'-phosphate
  modified_base 4: mod_base = OTHER; note = 2'-O-methyladenosine-3'-phosphate
  modified_base 6: mod_base = OTHER; note = 2'-O-methyluridine-3'-phosphate
  modified_base 8: mod_base = OTHER; note = 2'-O-methyluridine-3'-phosphate
  modified_base 9: mod_base = OTHER; note = 2'-O-methylguanosine-3'-phosphate
  modified_base 10: mod_base = OTHER; note = 2'-O-methyladenosine-3'-phosphate
  modified_base 11: mod_base = OTHER; note = 2'-O-methyladenosine-3'-phosphate
  modified_base 13: mod_base = OTHER; note = 2'-O-methyluridine-3'-phosphate
  modified_base 14: mod_base = OTHER; note = 2'-deoxy-2'-fluoroadenosine-3'-phosphate
  modified_base 15: mod_base = OTHER; note = 2'-O-methylguanosine-3'-phosphate
  modified_base 16: mod_base = OTHER; note = 2'-O-methyluridine-3'-phosphate
  modified_base 17: mod_base = OTHER; note = 2'-O-methylguanosine-3'-phosphate
  modified_base 18: mod_base = OTHER; note = 2'-O-methyluridine-3'-phosphate
  modified_base 19: mod_base = OTHER; note = 2'-O-methyluridine-3'-phosphate
  modified_base 20: mod_base = OTHER; note = 2'-O-methylcytidine-3'-phosphate
  modified_base 21: mod_base = OTHER; note = 2'-O-methyluridine-3'-phosphorothioate
  modified_base 22: mod_base = OTHER; note = 2'-O-methyladenosine-3'-phosphorothioate
  modified_base 23: mod_base = OTHER; note = 2'-O-methylcytidine
  misc_feature 1: note = RNA
  misc_feature 3..4: note = RNA
  misc_feature 6: note = RNA
  misc_feature 8..11: note = RNA
  misc_feature 13..23: note = RNA
  misc_feature 2: note = DNA
  misc_feature 5: note = DNA
  misc_feature 7: note = DNA
  misc_feature 12: note = DNA
ttgattatgaattagtgttctac

SEQ ID NO: 1272 - DNA, 23 bp, synthetic construct
  source 1..23: mol_type = other DNA
  modified_base 1: mod_base = OTHER; note = 2'-O-methyluridine-3'-phosphate 5'-(E)-Vinylphosphonate
  modified_base 2: mod_base = OTHER; note = 2'-deoxy-2'-fluorouridine-3'-phosphate
  modified_base 3: mod_base = OTHER; note = 2'-O-methylguanosine-3'-phosphate
  modified_base 4: mod_base = OTHER; note = 2'-O-methyladenosine-3'-phosphate
  modified_base 6: mod_base = OTHER; note = 2'-O-methyluridine-3'-phosphate
  modified_base 7: mod_base = OTHER; note = Adenosine-glycol nucleic acid (GNA), S-isomer
  modified_base 8: mod_base = OTHER; note = 2'-O-methyluridine-3'-phosphate
  modified_base 9: mod_base = OTHER; note = 2'-O-methylguanosine-3'-phosphate
  modified_base 10: mod_base = OTHER; note = 2'-O-methyladenosine-3'-phosphate
  modified_base 11: mod_base = OTHER; note = 2'-O-methyladenosine-3'-phosphate
  modified_base 12: mod_base = OTHER; note = 2'-O-methyluridine-3'-phosphate
  modified_base 13: mod_base = OTHER; note = 2'-O-methyluridine-3'-phosphate
  modified_base 14: mod_base = OTHER; note = 2'-deoxy-2'-fluoroadenosine-3'-phosphate
  modified_base 15: mod_base = OTHER; note = 2'-O-methylguanosine-3'-phosphate
  modified_base 16: mod_base = OTHER; note = 2'-deoxy-2'-fluorouridine-3'-phosphate
  modified_base 17: mod_base = OTHER; note = 2'-O-methylguanosine-3'-phosphate
  modified_base 18: mod_base = OTHER; note = 2'-O-methyluridine-3'-phosphate
  modified_base 19: mod_base = OTHER; note = 2'-O-methyluridine-3'-phosphate
  modified_base 20: mod_base = OTHER; note = 2'-O-methylcytidine-3'-phosphate
  modified_base 21: mod_base = OTHER; note = 2'-O-methyluridine-3'-phosphorothioate
  modified_base 22: mod_base = OTHER; note = 2'-O-methyladenosine-3'-phosphorothioate
  modified_base 23: mod_base = OTHER; note = 2'-O-methylcytidine
  misc_feature 1..4: note = RNA
  misc_feature 6..23: note = RNA
  misc_feature 5: note = DNA
ttgattatgaattagtgttctac

SEQ ID NO: 1273 - DNA, 23 bp, synthetic construct
  source 1..23: mol_type = other DNA
  modified_base 1: mod_base = OTHER; note = 2'-O-methyluridine-3'-phosphate 5'-(E)-Vinylphosphonate
  modified_base 3: mod_base = OTHER; note = 2'-O-methyluridine-3'-phosphate
  modified_base 4: mod_base = OTHER; note = 2'-O-methylguanosine-3'-phosphate
  modified_base 6: mod_base = OTHER; note = 2'-O-methyluridine-3'-phosphate
  modified_base 8: mod_base = OTHER; note = 2'-O-methyladenosine-3'-phosphate
  modified_base 9: mod_base = OTHER; note = 2'-O-methyluridine-3'-phosphate
  modified_base 10: mod_base = OTHER; note = 2'-O-methylguanosine-3'-phosphate
  modified_base 11: mod_base = OTHER; note = 2'-O-methyladenosine-3'-phosphate
  modified_base 13: mod_base = OTHER; note = 2'-O-methyluridine-3'-phosphate
  modified_base 14: mod_base = OTHER; note = 2'-deoxy-2'-fluorouridine-3'-phosphate
  modified_base 15: mod_base = OTHER; note = 2'-O-methyladenosine-3'-phosphate
  modified_base 16: mod_base = OTHER; note = 2'-O-methylguanosine-3'-phosphate
  modified_base 17: mod_base = OTHER; note = 2'-O-methyluridine-3'-phosphate
  modified_base 18: mod_base = OTHER; note = 2'-O-methylguanosine-3'-phosphate
  modified_base 19: mod_base = OTHER; note = 2'-O-methyluridine-3'-phosphate
  modified_base 20: mod_base = OTHER; note = 2'-O-methyluridine-3'-phosphate
  modified_base 21: mod_base = OTHER; note = 2'-O-methylcytidine-3'-phosphorothioate
  modified_base 22: mod_base = OTHER; note = 2'-O-methyluridine-3'-phosphorothioate
  modified_base 23: mod_base = OTHER; note = 2'-O-methyladenosine
  misc_feature 1: note = RNA
  misc_feature 3..4: note = RNA
  misc_feature 6: note = RNA
  misc_feature 8..11: note = RNA
  misc_feature 13..23: note = RNA
  misc_feature 2: note = DNA
  misc_feature 5: note = DNA
  misc_feature 7: note = DNA
  misc_feature 12: note = DNA
tgtgattatgaattagtgttcta

SEQ ID NO: 1274 - DNA, 23 bp, synthetic construct
  source 1..23: mol_type = other DNA
  modified_base 1: mod_base = OTHER; note = 2'-O-methyluridine-3'-phosphate 5'-(E)-Vinylphosphonate
  modified_base 2: mod_base = OTHER; note = 2'-deoxy-2'-fluoroadenosine-3'-phosphate
  modified_base 3: mod_base = OTHER; note = 2'-O-methylguanosine-3'-phosphate
  modified_base 4: mod_base = OTHER; note = 2'-O-methyluridine-3'-phosphate
  modified_base 6: mod_base = OTHER; note = 2'-O-methyladenosine-3'-phosphate
  modified_base 7: mod_base = OTHER; note = Thymidine-glycol nucleic acid (GNA), S-Isomer
  modified_base 8: mod_base = OTHER; note = 2'-O-methyluridine-3'-phosphate
  modified_base 9: mod_base = OTHER; note = 2'-O-methyladenosine-3'-phosphate
  modified_base 10: mod_base = OTHER; note = 2'-O-methyluridine-3'-phosphate
  modified_base 11: mod_base = OTHER; note = 2'-O-methylguanosine-3'-phosphate
  modified_base 12: mod_base = OTHER; note = 2'-O-methyladenosine-3'-phosphate
  modified_base 13: mod_base = OTHER; note = 2'-O-methyladenosine-3'-phosphate
  modified_base 14: mod_base = OTHER; note = 2'-deoxy-2'-fluorouridine-3'-phosphate
  modified_base 15: mod_base = OTHER; note = 2'-O-methyluridine-3'-phosphate
  modified_base 16: mod_base = OTHER; note = 2'-deoxy-2'-fluoroadenosine-3'-phosphate
  modified_base 17: mod_base = OTHER; note = 2'-O-methylguanosine-3'-phosphate
  modified_base 18: mod_base = OTHER; note = 2'-O-methyluridine-3'-phosphate
  modified_base 19: mod_base = OTHER; note = 2'-O-methylguanosine-3'-phosphate
  modified_base 20: mod_base = OTHER; note = 2'-O-methyluridine-3'-phosphate
  modified_base 21: mod_base = OTHER; note = 2'-O-methyluridine-3'-phosphorothioate
  modified_base 22: mod_base = OTHER; note = 2'-O-methylcytidine-3'-phosphorothioate
  modified_base 23: mod_base = OTHER; note = 2'-O-methyluridine
  misc_feature 1..4: note = RNA
  misc_feature 6..23: note = RNA
  misc_feature 5: note = DNA
tagtgattatgaattagtgttct

SEQ ID NO: 1275 - DNA, 23 bp, synthetic construct
  source 1..23: mol_type = other DNA
  modified_base 1: mod_base = OTHER; note = 2'-O-methyluridine-3'-phosphate 5'-(E)-Vinylphosphonate
  modified_base 3: mod_base = OTHER; note = 2'-O-methyladenosine-3'-phosphate
  modified_base 4: mod_base = OTHER; note = 2'-O-methylguanosine-3'-phosphate
  modified_base 6: mod_base = OTHER; note = 2'-O-methyladenosine-3'-phosphate
  modified_base 8: mod_base = OTHER; note = 2'-O-methyladenosine-3'-phosphate
  modified_base 9: mod_base = OTHER; note = 2'-O-methylcytidine-3'-phosphate
  modified_base 10: mod_base = OTHER; note = 2'-O-methyluridine-3'-phosphate
  modified_base 11: mod_base = OTHER; note = 2'-O-methyladenosine-3'-phosphate
  modified_base 13: mod_base = OTHER; note = 2'-O-methyluridine-3'-phosphate
  modified_base 14: mod_base = OTHER; note = 2'-deoxy-2'-fluorouridine-3'-phosphate
  modified_base 15: mod_base = OTHER; note = 2'-O-methylguanosine-3'-phosphate
  modified_base 16: mod_base = OTHER; note = 2'-O-methylguanosine-3'-phosphate
  modified_base 17: mod_base = OTHER; note = 2'-O-methyladenosine-3'-phosphate
  modified_base 18: mod_base = OTHER; note = 2'-O-methylcytidine-3'-phosphate
  modified_base 19: mod_base = OTHER; note = 2'-O-methylcytidine-3'-phosphate
  modified_base 20: mod_base = OTHER; note = 2'-O-methyladenosine-3'-phosphate
  modified_base 21: mod_base = OTHER; note = 2'-O-methyluridine-3'-phosphorothioate
  modified_base 22: mod_base = OTHER; note = 2'-O-methyluridine-3'-phosphorothioate
  modified_base 23: mod_base = OTHER; note = 2'-O-methyluridine
  misc_feature 1: note = RNA
  misc_feature 3..4: note = RNA
  misc_feature 6: note = RNA
  misc_feature 8..11: note = RNA
  misc_feature 13..23: note = RNA
  misc_feature 2: note = DNA
  misc_feature 5: note = DNA
  misc_feature 7: note = DNA
  misc_feature 12: note = DNA
taaggaaactaattggaccattt

SEQ ID NO: 1276 - DNA, 23 bp, synthetic construct
  source 1..23: mol_type = other DNA
  modified_base 1: mod_base = OTHER; note = 2'-O-methyluridine-3'-phosphate 5'-(E)-Vinylphosphonate
  modified_base 3: mod_base = OTHER; note = 2'-O-methyluridine-3'-phosphate
  modified_base 4: mod_base = OTHER; note = 2'-O-methyladenosine-3'-phosphate
  modified_base 6: mod_base = OTHER; note = 2'-O-methylcytidine-3'-phosphate
  modified_base 8: mod_base = OTHER; note = 2'-O-methyladenosine-3'-phosphate
  modified_base 9: mod_base = OTHER; note = 2'-O-methyluridine-3'-phosphate
  modified_base 10: mod_base = OTHER; note = 2'-O-methyladenosine-3'-phosphate
  modified_base 11: mod_base = OTHER; note = 2'-O-methylcytidine-3'-phosphate
  modified_base 13: mod_base = OTHER; note = 2'-O-methyluridine-3'-phosphate
  modified_base 14: mod_base = OTHER; note = 2'-deoxy-2'-fluoroadenosine-3'-phosphate
  modified_base 15: mod_base = OTHER; note = 2'-O-methyluridine-3'-phosphate
  modified_base 16: mod_base = OTHER; note = 2'-O-methylcytidine-3'-phosphate
  modified_base 17: mod_base = OTHER; note = 2'-O-methylcytidine-3'-phosphate
  modified_base 18: mod_base = OTHER; note = 2'-O-methylcytidine-3'-phosphate
  modified_base 19: mod_base = OTHER; note = 2'-O-methyladenosine-3'-phosphate
  modified_base 20: mod_base = OTHER; note = 2'-O-methyladenosine-3'-phosphate
  modified_base 21: mod_base = OTHER; note = 2'-O-methyladenosine-3'-phosphorothioate
  modified_base 22: mod_base = OTHER; note = 2'-O-methyluridine-3'-phosphorothioate
  modified_base 23: mod_base = OTHER; note = 2'-O-methyladenosine
  misc_feature 1: note = RNA
  misc_feature 3..4: note = RNA
  misc_feature 6: note = RNA
  misc_feature 8..11: note = RNA
  misc_feature 13..23: note = RNA
  misc_feature 2: note = DNA
  misc_feature 5: note = DNA
  misc_feature 7: note = DNA
  misc_feature 12: note = DNA
tctacccatacatatcccaaata

SEQ ID NO: 1277 - DNA, 23 bp, synthetic construct
  source 1..23: mol_type = other DNA
  modified_base 1: mod_base = OTHER; note = 2'-O-methyluridine-3'-phosphate 5'-(E)-Vinylphosphonate
  modified_base 2: mod_base = OTHER; note = 2'-deoxy-2'-fluorouridine-3'-phosphate
  modified_base 3: mod_base = OTHER; note = 2'-O-methylguanosine-3'-phosphate
  modified_base 4: mod_base = OTHER; note = 2'-O-methyladenosine-3'-phosphate
  modified_base 6: mod_base = OTHER; note = 2'-O-methyluridine-3'-phosphate
  modified_base 7: mod_base = OTHER; note = Thymidine-glycol nucleic acid (GNA), S-Isomer
  modified_base 8: mod_base = OTHER; note = 2'-O-methyladenosine-3'-phosphate
  modified_base 9: mod_base = OTHER; note = 2'-O-methylcytidine-3'-phosphate
  modified_base 10: mod_base = OTHER; note = 2'-O-methylcytidine-3'-phosphate
  modified_base 11: mod_base = OTHER; note = 2'-O-methylcytidine-3'-phosphate
  modified_base 12: mod_base = OTHER; note = 2'-O-methyluridine-3'-phosphate
  modified_base 13: mod_base = OTHER; note = 2'-O-methyladenosine-3'-phosphate
  modified_base 14: mod_base = OTHER; note = 2'-deoxy-2'-fluorocytidine-3'-phosphate
  modified_base 15: mod_base = OTHER; note = 2'-O-methylcytidine-3'-phosphate
  modified_base 16: mod_base = OTHER; note = 2'-deoxy-2'-fluorocytidine-3'-phosphate
  modified_base 17: mod_base = OTHER; note = 2'-O-methyladenosine-3'-phosphate
  modified_base 18: mod_base = OTHER; note = 2'-O-methyluridine-3'-phosphate
  modified_base 19: mod_base = OTHER; note = 2'-O-methyladenosine-3'-phosphate
  modified_base 20: mod_base = OTHER; note = 2'-O-methylcytidine-3'-phosphate
  modified_base 21: mod_base = OTHER; note = 2'-O-methyladenosine-3'-phosphorothioate
  modified_base 22: mod_base = OTHER; note = 2'-O-methyluridine-3'-phosphorothioate
  modified_base 23: mod_base = OTHER; note = 2'-O-methyladenosine
  misc_feature 1..4: note = RNA
  misc_feature 6..23: note = RNA
  misc_feature 5: note = DNA
ttgatttaccctacccatacata

SEQ ID NO: 1278 - DNA, 23 bp, synthetic construct
  source 1..23: mol_type = other DNA
  modified_base 1: mod_base = OTHER; note = 2'-O-methyluridine-3'-phosphate 5'-(E)-Vinylphosphonate
  modified_base 2: mod_base = OTHER; note = 2'-deoxy-2'-fluorouridine-3'-phosphate
  modified_base 3: mod_base = OTHER; note = 2'-O-methyladenosine-3'-phosphate
  modified_base 4: mod_base = OTHER; note = 2'-O-methylcytidine-3'-phosphate
  modified_base 6: mod_base = OTHER; note = 2'-O-methylguanosine-3'-phosphate
  modified_base 7: mod_base = OTHER; note = Adenosine-glycol nucleic acid (GNA), S-isomer
  modified_base 8: mod_base = OTHER; note = 2'-O-methyluridine-3'-phosphate
  modified_base 9: mod_base = OTHER; note = 2'-O-methyluridine-3'-phosphate
  modified_base 10: mod_base = OTHER; note = 2'-O-methyluridine-3'-phosphate
  modified_base 11: mod_base = OTHER; note = 2'-O-methyladenosine-3'-phosphate
  modified_base 12: mod_base = OTHER; note = 2'-O-methylcytidine-3'-phosphate
  modified_base 13: mod_base = OTHER; note = 2'-O-methylcytidine-3'-phosphate
  modified_base 14: mod_base = OTHER; note = 2'-deoxy-2'-fluorocytidine-3'-phosphate
  modified_base 15: mod_base = OTHER; note = 2'-O-methyluridine-3'-phosphate
  modified_base 16: mod_base = OTHER; note = 2'-deoxy-2'-fluoroadenosine-3'-phosphate
  modified_base 17: mod_base = OTHER; note = 2'-O-methylcytidine-3'-phosphate
  modified_base 18: mod_base = OTHER; note = 2'-O-methylcytidine-3'-phosphate
  modified_base 19: mod_base = OTHER; note = 2'-O-methylcytidine-3'-phosphate
  modified_base 20: mod_base = OTHER; note = 2'-O-methyladenosine-3'-phosphate
  modified_base 21: mod_base = OTHER; note = 2'-O-methyluridine-3'-phosphorothioate
  modified_base 22: mod_base = OTHER; note = 2'-O-methyladenosine-3'-phosphorothioate
  modified_base 23: mod_base = OTHER; note = 2'-O-methylcytidine
  misc_feature 1..4: note = RNA
  misc_feature 6..23: note = RNA
  misc_feature 5: note = DNA
ttactgatttaccctacccatac

SEQ ID NO: 1279 - DNA, 23 bp, synthetic construct
  source 1..23: mol_type = other DNA
  modified_base 1: mod_base = OTHER; note = 2'-O-methyluridine-3'-phosphate 5'-(E)-Vinylphosphonate
  modified_base 3: mod_base = OTHER; note = 2'-O-methyluridine-3'-phosphate
  modified_base 4: mod_base = OTHER; note = 2'-O-methylcytidine-3'-phosphate
  modified_base 6: mod_base = OTHER; note = 2'-O-methyluridine-3'-phosphate
  modified_base 8: mod_base = OTHER; note = 2'-O-methylcytidine-3'-phosphate
  modified_base 9: mod_base = OTHER; note = 2'-O-methyluridine-3'-phosphate
  modified_base 10: mod_base = OTHER; note = 2'-O-methylguanosine-3'-phosphate
  modified_base 11: mod_base = OTHER; note = 2'-O-methyladenosine-3'-phosphate
  modified_base 13: mod_base = OTHER; note = 2'-O-methyluridine-3'-phosphate
  modified_base 14: mod_base = OTHER; note = 2'-deoxy-2'-fluorouridine-3'-phosphate
  modified_base 15: mod_base = OTHER; note = 2'-O-methyladenosine-3'-phosphate
  modified_base 16: mod_base = OTHER; note = 2'-O-methylcytidine-3'-phosphate
  modified_base 17: mod_base = OTHER; note = 2'-O-methylcytidine-3'-phosphate
  modified_base 18: mod_base = OTHER; note = 2'-O-methylcytidine-3'-phosphate
  modified_base 19: mod_base = OTHER; note = 2'-O-methyluridine-3'-phosphate
  modified_base 20: mod_base = OTHER; note = 2'-O-methyladenosine-3'-phosphate
  modified_base 21: mod_base = OTHER; note = 2'-O-methylcytidine-3'-phosphorothioate
  modified_base 22: mod_base = OTHER; note = 2'-O-methylcytidine-3'-phosphorothioate
  modified_base 23: mod_base = OTHER; note = 2'-O-methylcytidine
  misc_feature 1: note = RNA
  misc_feature 3..4: note = RNA
  misc_feature 6: note = RNA
  misc_feature 8..11: note = RNA
  misc_feature 13..23: note = RNA
  misc_feature 2: note = DNA
  misc_feature 5: note = DNA
  misc_feature 7: note = DNA
  misc_feature 12: note = DNA
tctcttactgatttaccctaccc

SEQ ID NO: 1280 - DNA, 23 bp, synthetic construct
  source 1..23: mol_type = other DNA
  modified_base 1: mod_base = OTHER; note = 2'-O-methyluridine-3'-phosphate 5'-(E)-Vinylphosphonate
  modified_base 2: mod_base = OTHER; note = 2'-deoxy-2'-fluoroadenosine-3'-phosphate
  modified_base 3: mod_base = OTHER; note = 2'-O-methylcytidine-3'-phosphate
  modified_base 4: mod_base = OTHER; note = 2'-O-methylcytidine-3'-phosphate
  modified_base 6: mod_base = OTHER; note = 2'-O-methylcytidine-3'-phosphate
  modified_base 7: mod_base = OTHER; note = Thymidine-glycol nucleic acid (GNA), S-Isomer
  modified_base 8: mod_base = OTHER; note = 2'-O-methyluridine-3'-phosphate
  modified_base 9: mod_base = OTHER; note = 2'-O-methyladenosine-3'-phosphate
  modified_base 10: mod_base = OTHER; note = 2'-O-methylcytidine-3'-phosphate
  modified_base 11: mod_base = OTHER; note = 2'-O-methyluridine-3'-phosphate
  modified_base 12: mod_base = OTHER; note = 2'-O-methylguanosine-3'-phosphate
  modified_base 13: mod_base = OTHER; note = 2'-O-methyladenosine-3'-phosphate
  modified_base 14: mod_base = OTHER; note = 2'-deoxy-2'-fluorouridine-3'-phosphate
  modified_base 15: mod_base = OTHER; note = 2'-O-methyluridine-3'-phosphate
  modified_base 16: mod_base = OTHER; note = 2'-deoxy-2'-fluorouridine-3'-phosphate
  modified_base 17: mod_base = OTHER; note = 2'-O-methyladenosine-3'-phosphate
  modified_base 18: mod_base = OTHER; note = 2'-O-methylcytidine-3'-phosphate
  modified_base 19: mod_base = OTHER; note = 2'-O-methylcytidine-3'-phosphate
  modified_base 20: mod_base = OTHER; note = 2'-O-methylcytidine-3'-phosphate
  modified_base 21: mod_base = OTHER; note = 2'-O-methyluridine-3'-phosphorothioate
  modified_base 22: mod_base = OTHER; note = 2'-O-methyladenosine-3'-phosphorothioate
  modified_base 23: mod_base = OTHER; note = 2'-O-methylcytidine
  misc_feature 1..4: note = RNA
  misc_feature 6..23: note = RNA
  misc_feature 5: note = DNA
tacctcttactgatttaccctac

SEQ ID NO: 1281 - DNA, 23 bp, synthetic construct
  source 1..23: mol_type = other DNA
  modified_base 1: mod_base = OTHER; note = 2'-O-methyluridine-3'-phosphate 5'-(E)-Vinylphosphonate
  modified_base 3: mod_base = OTHER; note = 2'-O-methyladenosine-3'-phosphate
  modified_base 4: mod_base = OTHER; note = 2'-O-methylcytidine-3'-phosphate
  modified_base 6: mod_base = OTHER; note = 2'-O-methyluridine-3'-phosphate
  modified_base 8: mod_base = OTHER; note = 2'-O-methyluridine-3'-phosphate
  modified_base 9: mod_base = OTHER; note = 2'-O-methyluridine-3'-phosphate
  modified_base 10: mod_base = OTHER; note = 2'-O-methyladenosine-3'-phosphate
  modified_base 11: mod_base = OTHER; note = 2'-O-methylcytidine-3'-phosphate
  modified_base 13: mod_base = OTHER; note = 2'-O-methylguanosine-3'-phosphate
  modified_base 14: mod_base = OTHER; note = 2'-deoxy-2'-fluoroadenosine-3'-phosphate
  modified_base 15: mod_base = OTHER; note = 2'-O-methyluridine-3'-phosphate
  modified_base 16: mod_base = OTHER; note = 2'-O-methyluridine-3'-phosphate
  modified_base 17: mod_base = OTHER; note = 2'-O-methyluridine-3'-phosphate
  modified_base 18: mod_base = OTHER; note = 2'-O-methyladenosine-3'-phosphate
  modified_base 19: mod_base = OTHER; note = 2'-O-methylcytidine-3'-phosphate
  modified_base 20: mod_base = OTHER; note = 2'-O-methylcytidine-3'-phosphate
  modified_base 21: mod_base = OTHER; note = 2'-O-methylcytidine-3'-phosphorothioate
  modified_base 22: mod_base = OTHER; note = 2'-O-methyluridine-3'-phosphorothioate
  modified_base 23: mod_base = OTHER; note = 2'-O-methyladenosine
  misc_feature 1: note = RNA
  misc_feature 3..4: note = RNA
  misc_feature 6: note = RNA
  misc_feature 8..11: note = RNA
  misc_feature 13..23: note = RNA
  misc_feature 2: note = DNA
  misc_feature 5: note = DNA
  misc_feature 7: note = DNA
  misc_feature 12: note = DNA
tcacctcttactgatttacccta

SEQ ID NO: 1282 - DNA, 23 bp, synthetic construct
  source 1..23: mol_type = other DNA
  modified_base 1: mod_base = OTHER; note = 2'-O-methyluridine-3'-phosphate 5'-(E)-Vinylphosphonate
  modified_base 3: mod_base = OTHER; note = 2'-O-methyladenosine-3'-phosphate
  modified_base 4: mod_base = OTHER; note = 2'-O-methylcytidine-3'-phosphate
  modified_base 6: mod_base = OTHER; note = 2'-O-methylcytidine-3'-phosphate
  modified_base 8: mod_base = OTHER; note = 2'-O-methyluridine-3'-phosphate
  modified_base 9: mod_base = OTHER; note = 2'-O-methylcytidine-3'-phosphate
  modified_base 10: mod_base = OTHER; note = 2'-O-methyluridine-3'-phosphate
  modified_base 11: mod_base = OTHER; note = 2'-O-methyluridine-3'-phosphate
  modified_base 13: mod_base = OTHER; note = 2'-O-methylcytidine-3'-phosphate
  modified_base 14: mod_base = OTHER; note = 2'-deoxy-2'-fluorouridine-3'-phosphate
  modified_base 15: mod_base = OTHER; note = 2'-O-methylguanosine-3'-phosphate
  modified_base 16: mod_base = OTHER; note = 2'-O-methyladenosine-3'-phosphate
  modified_base 17: mod_base = OTHER; note = 2'-O-methyluridine-3'-phosphate
  modified_base 18: mod_base = OTHER; note = 2'-O-methyluridine-3'-phosphate
  modified_base 19: mod_base = OTHER; note = 2'-O-methyluridine-3'-phosphate
  modified_base 20: mod_base = OTHER; note = 2'-O-methyladenosine-3'-phosphate
  modified_base 21: mod_base = OTHER; note = 2'-O-methylcytidine-3'-phosphorothioate
  modified_base 22: mod_base = OTHER; note = 2'-O-methylcytidine-3'-phosphorothioate
  modified_base 23: mod_base = OTHER; note = 2'-O-methylcytidine
  misc_feature 1: note = RNA
  misc_feature 3..4: note = RNA
  misc_feature 6: note = RNA
  misc_feature 8..11: note = RNA
  misc_feature 13..23: note = RNA
  misc_feature 2: note = DNA
  misc_feature 5: note = DNA
  misc_feature 7: note = DNA
  misc_feature 12: note = DNA
taacacctcttactgatttaccc

SEQ ID NO: 1283 - DNA, 23 bp, synthetic construct
  source 1..23: mol_type = other DNA
  modified_base 1: mod_base = OTHER; note = 2'-O-methyluridine-3'-phosphate 5'-(E)-Vinylphosphonate
  modified_base 2: mod_base = OTHER; note = 2'-deoxy-2'-fluoroadenosine-3'-phosphate
  modified_base 3: mod_base = OTHER; note = 2'-O-methyluridine-3'-phosphate
  modified_base 4: mod_base = OTHER; note = 2'-O-methyladenosine-3'-phosphate
  modified_base 6: mod_base = OTHER; note = 2'-O-methylcytidine-3'-phosphate
  modified_base 7: mod_base = OTHER; note = Adenosine-glycol nucleic acid (GNA), S-isomer
  modified_base 8: mod_base = OTHER; note = 2'-O-methylcytidine-3'-phosphate
  modified_base 9: mod_base = OTHER; note = 2'-O-methylcytidine-3'-phosphate
  modified_base 10: mod_base = OTHER; note = 2'-O-methyluridine-3'-phosphate
  modified_base 11: mod_base = OTHER; note = 2'-O-methylcytidine-3'-phosphate
  modified_base 12: mod_base = OTHER; note = 2'-O-methyluridine-3'-phosphate
  modified_base 13: mod_base = OTHER; note = 2'-O-methyluridine-3'-phosphate
  modified_base 14: mod_base = OTHER; note = 2'-deoxy-2'-fluoroadenosine-3'-phosphate
  modified_base 15: mod_base = OTHER; note = 2'-O-methylcytidine-3'-phosphate
  modified_base 16: mod_base = OTHER; note = 2'-deoxy-2'-fluorouridine-3'-phosphate
  modified_base 17: mod_base = OTHER; note = 2'-O-methylguanosine-3'-phosphate
  modified_base 18: mod_base = OTHER; note = 2'-O-methyladenosine-3'-phosphate
  modified_base 19: mod_base = OTHER; note = 2'-O-methyluridine-3'-phosphate
  modified_base 20: mod_base = OTHER; note = 2'-O-methyluridine-3'-phosphate
  modified_base 21: mod_base = OTHER; note = 2'-O-methyluridine-3'-phosphorothioate
  modified_base 22: mod_base = OTHER; note = 2'-O-methyladenosine-3'-phosphorothioate
  modified_base 23: mod_base = OTHER; note = 2'-O-methylcytidine
  misc_feature 1..4: note = RNA
  misc_feature 6..23: note = RNA
  misc_feature 5: note = DNA
tataacacctcttactgatttac

SEQ ID NO: 1284 - DNA, 23 bp, synthetic construct
  source 1..23: mol_type = other DNA
  modified_base 1: mod_base = OTHER; note = 2'-O-methyluridine-3'-phosphate 5'-(E)-Vinylphosphonate
  modified_base 3: mod_base = OTHER; note = 2'-O-methyladenosine-3'-phosphate
  modified_base 4: mod_base = OTHER; note = 2'-O-methyluridine-3'-phosphate
  modified_base 6: mod_base = OTHER; note = 2'-O-methyladenosine-3'-phosphate
  modified_base 8: mod_base = OTHER; note = 2'-O-methyladenosine-3'-phosphate
  modified_base 9: mod_base = OTHER; note = 2'-O-methylcytidine-3'-phosphate
  modified_base 10: mod_base = OTHER; note = 2'-O-methylcytidine-3'-phosphate
  modified_base 11: mod_base = OTHER; note = 2'-O-methyluridine-3'-phosphate
  modified_base 13: mod_base = OTHER; note = 2'-O-methyluridine-3'-phosphate
  modified_base 14: mod_base = OTHER; note = 2'-deoxy-2'-fluorouridine-3'-phosphate
  modified_base 15: mod_base = OTHER; note = 2'-O-methyladenosine-3'-phosphate
  modified_base 16: mod_base = OTHER; note = 2'-O-methylcytidine-3'-phosphate
  modified_base 17: mod_base = OTHER; note = 2'-O-methyluridine-3'-phosphate
  modified_base 18: mod_base = OTHER; note = 2'-O-methylguanosine-3'-phosphate
  modified_base 19: mod_base = OTHER; note = 2'-O-methyladenosine-3'-phosphate
  modified_base 20: mod_base = OTHER; note = 2'-O-methyluridine-3'-phosphate
  modified_base 21: mod_base = OTHER; note = 2'-O-methyluridine-3'-phosphorothioate
  modified_base 22: mod_base = OTHER; note = 2'-O-methyluridine-3'-phosphorothioate
  modified_base 23: mod_base = OTHER; note = 2'-O-methyladenosine
  misc_feature 1: note = RNA
  misc_feature 3..4: note = RNA
  misc_feature 6: note = RNA
  misc_feature 8..11: note = RNA
  misc_feature 13..23: note = RNA
  misc_feature 2: note = DNA
  misc_feature 5: note = DNA
  misc_feature 7: note = DNA
  misc_feature 12: note = DNA
taataacacctcttactgattta

SEQ ID NO: 1285 - DNA, 23 bp, synthetic construct
  source 1..23: mol_type = other DNA
  modified_base 1: mod_base = OTHER; note = 2'-O-methyluridine-3'-phosphate 5'-(E)-Vinylphosphonate
  modified_base 3: mod_base = OTHER; note = 2'-O-methylcytidine-3'-phosphate
  modified_base 4: mod_base = OTHER; note = 2'-O-methyladenosine-3'-phosphate
  modified_base 6: mod_base = OTHER; note = 2'-O-methyladenosine-3'-phosphate
  modified_base 8: mod_base = OTHER; note = 2'-O-methyladenosine-3'-phosphate
  modified_base 9: mod_base = OTHER; note = 2'-O-methyladenosine-3'-phosphate
  modified_base 10: mod_base = OTHER; note = 2'-O-methylcytidine-3'-phosphate
  modified_base 11: mod_base = OTHER; note = 2'-O-methyladenosine-3'-phosphate
  modified_base 13: mod_base = OTHER; note = 2'-O-methylcytidine-3'-phosphate
  modified_base 14: mod_base = OTHER; note = 2'-deoxy-2'-fluorouridine-3'-phosphate
  modified_base 15: mod_base = OTHER; note = 2'-O-methylcytidine-3'-phosphate
  modified_base 16: mod_base = OTHER; note = 2'-O-methyluridine-3'-phosphate
  modified_base 17: mod_base = OTHER; note = 2'-O-methyluridine-3'-phosphate
  modified_base 18: mod_base = OTHER; note = 2'-O-methyladenosine-3'-phosphate
  modified_base 19: mod_base = OTHER; note = 2'-O-methylcytidine-3'-phosphate
  modified_base 20: mod_base = OTHER; note = 2'-O-methyluridine-3'-phosphate
  modified_base 21: mod_base = OTHER; note = 2'-O-methylguanosine-3'-phosphorothioate
  modified_base 22: mod_base = OTHER; note = 2'-O-methyladenosine-3'-phosphorothioate
  modified_base 23: mod_base = OTHER; note = 2'-O-methyluridine
  misc_feature 1: note = RNA
  misc_feature 3..4: note = RNA
  misc_feature 6: note = RNA
  misc_feature 8..11: note = RNA
  misc_feature 13..23: note = RNA
  misc_feature 2: note = DNA
  misc_feature 5: note = DNA
  misc_feature 7: note = DNA
  misc_feature 12: note = DNA
tccaaataacacctcttactgat

SEQ ID NO: 1286 - DNA, 23 bp, synthetic construct
  source 1..23: mol_type = other DNA
  modified_base 1: mod_base = OTHER; note = 2'-O-methyluridine-3'-phosphate 5'-(E)-Vinylphosphonate
  modified_base 2: mod_base = OTHER; note = 2'-deoxy-2'-fluoroguanosine-3'-phosphate
  modified_base 3: mod_base = OTHER; note = 2'-O-methylguanosine-3'-phosphate
  modified_base 4: mod_base = OTHER; note = 2'-O-methyluridine-3'-phosphate
  modified_base 6: mod_base = OTHER; note = 2'-O-methylcytidine-3'-phosphate
  modified_base 7: mod_base = OTHER; note = cytidine-2'-phosphate
  modified_base 8: mod_base = OTHER; note = 2'-O-methyladenosine-3'-phosphate
  modified_base 9: mod_base = OTHER; note = 2'-O-methyluridine-3'-phosphate
  modified_base 10: mod_base = OTHER; note = 2'-O-methylguanosine-3'-phosphate
  modified_base 11: mod_base = OTHER; note = 2'-O-methylguanosine-3'-phosphate
  modified_base 12: mod_base = OTHER; note = 2'-O-methylcytidine-3'-phosphate
  modified_base 13: mod_base = OTHER; note = 2'-O-methylcytidine-3'-phosphate
  modified_base 14: mod_base = OTHER; note = 2'-deoxy-2'-fluoroadenosine-3'-phosphate
  modified_base 15: mod_base = OTHER; note = 2'-O-methyluridine-3'-phosphate
  modified_base 16: mod_base = OTHER; note = 2'-deoxy-2'-fluoroguanosine-3'-phosphate
  modified_base 17: mod_base = OTHER; note = 2'-O-methyluridine-3'-phosphate
  modified_base 18: mod_base = OTHER; note = 2'-O-methylcytidine-3'-phosphate
  modified_base 19: mod_base = OTHER; note = 2'-O-methylcytidine-3'-phosphate
  modified_base 20: mod_base = OTHER; note = 2'-O-methyladenosine-3'-phosphate
  modified_base 21: mod_base = OTHER; note = 2'-O-methyladenosine-3'-phosphorothioate
  modified_base 22: mod_base = OTHER; note = 2'-O-methylcytidine-3'-phosphorothioate
  modified_base 23: mod_base = OTHER; note = 2'-O-methyluridine
  misc_feature 1..4: note = RNA
  misc_feature 6..23: note = RNA
  misc_feature 5: note = DNA
tggttccatggccatgtccaact

SEQ ID NO: 1287 - DNA, 23 bp, synthetic construct
  source 1..23: mol_type = other DNA
  modified_base 1: mod_base = OTHER; note = 2'-O-methyluridine-3'-phosphate 5'-(E)-Vinylphosphonate
  modified_base 2: mod_base = OTHER; note = 2'-deoxy-2'-fluoroadenosine-3'-phosphate
  modified_base 3: mod_base = OTHER; note = 2'-O-methylguanosine-3'-phosphate
  modified_base 4: mod_base = OTHER; note = 2'-O-methyladenosine-3'-phosphate
  modified_base 6: mod_base = OTHER; note = 2'-O-methyluridine-3'-phosphate
  modified_base 7: mod_base = OTHER; note = guanosine-2'-phosphate
  modified_base 8: mod_base = OTHER; note = 2'-O-methylguanosine-3'-phosphate
  modified_base 9: mod_base = OTHER; note = 2'-O-methyladenosine-3'-phosphate
  modified_base 10: mod_base = OTHER; note = 2'-O-methyluridine-3'-phosphate
  modified_base 11: mod_base = OTHER; note = 2'-O-methyluridine-3'-phosphate
  modified_base 12: mod_base = OTHER; note = 2'-O-methylcytidine-3'-phosphate
  modified_base 13: mod_base = OTHER; note = 2'-O-methylcytidine-3'-phosphate
  modified_base 14: mod_base = OTHER; note = 2'-deoxy-2'-fluoroadenosine-3'-phosphate
  modified_base 15: mod_base = OTHER; note = 2'-O-methylguanosine-3'-phosphate
  modified_base 16: mod_base = OTHER; note = 2'-deoxy-2'-fluoroadenosine-3'-phosphate
  modified_base 17: mod_base = OTHER; note = 2'-O-methylguanosine-3'-phosphate
  modified_base 18: mod_base = OTHER; note = 2'-O-methyluridine-3'-phosphate
  modified_base 19: mod_base = OTHER; note = 2'-O-methylcytidine-3'-phosphate
  modified_base 20: mod_base = OTHER; note = 2'-O-methylcytidine-3'-phosphate
  modified_base 21: mod_base = OTHER; note = 2'-O-methyladenosine-3'-phosphorothioate
  modified_base 22: mod_base = OTHER; note = 2'-O-methylguanosine-3'-phosphorothioate
  modified_base 23: mod_base = OTHER; note = 2'-O-methylguanosine
  misc_feature 1..4: note = RNA
  misc_feature 6..23: note = RNA
  misc_feature 5: note = DNA
tagaatggattccagagtccagg

SEQ ID NO: 1288 - DNA, 23 bp, synthetic construct
  source 1..23: mol_type = other DNA
  modified_base 1: mod_base = OTHER; note = 2'-O-methyluridine-3'-phosphate 5'-(E)-Vinylphosphonate
  modified_base 2: mod_base = OTHER; note = 2'-deoxy-2'-fluoroadenosine-3'-phosphate
  modified_base 3: mod_base = OTHER; note = 2'-O-methyluridine-3'-phosphate
  modified_base 4: mod_base = OTHER; note = 2'-O-methyluridine-3'-phosphate
  modified_base 6: mod_base = OTHER; note = 2'-O-methylcytidine-3'-phosphate
  modified_base 7: mod_base = OTHER; note = cytidine-2'-phosphate
  modified_base 8: mod_base = OTHER; note = 2'-O-methyluridine-3'-phosphate
  modified_base 9: mod_base = OTHER; note = 2'-O-methyluridine-3'-phosphate
  modified_base 10: mod_base = OTHER; note = 2'-O-methyluridine-3'-phosphate
  modified_base 11: mod_base = OTHER; note = 2'-O-methyladenosine-3'-phosphate
  modified_base 12: mod_base = OTHER; note = 2'-O-methylcytidine-3'-phosphate
  modified_base 13: mod_base = OTHER; note = 2'-O-methylcytidine-3'-phosphate
  modified_base 14: mod_base = OTHER; note = 2'-deoxy-2'-fluoroadenosine-3'-phosphate
  modified_base 15: mod_base = OTHER; note = 2'-O-methylcytidine-3'-phosphate
  modified_base 16: mod_base = OTHER; note = 2'-deoxy-2'-fluorouridine-3'-phosphate
  modified_base 17: mod_base = OTHER; note = 2'-O-methylcytidine-3'-phosphate
  modified_base 18: mod_base = OTHER; note = 2'-O-methyladenosine-3'-phosphate
  modified_base 19: mod_base = OTHER; note = 2'-O-methylguanosine-3'-phosphate
  modified_base 20: mod_base = OTHER; note = 2'-O-methyladenosine-3'-phosphate
  modified_base 21: mod_base = OTHER; note = 2'-O-methylguanosine-3'-phosphorothioate
  modified_base 22: mod_base = OTHER; note = 2'-O-methyladenosine-3'-phosphorothioate
  modified_base 23: mod_base = OTHER; note = 2'-O-methyladenosine
  misc_feature 1..4: note = RNA
  misc_feature 6..23: note = RNA
  misc_feature 5: note = DNA
tattgcctttaccactcagagaa

SEQ ID NO: 1289 - DNA, 23 bp, synthetic construct
  source 1..23: mol_type = other DNA
  modified_base 1: mod_base = OTHER; note = 2'-O-methyluridine-3'-phosphate 5'-(E)-Vinylphosphonate
  modified_base 2: mod_base = OTHER; note = 2'-deoxy-2'-fluorouridine-3'-phosphate
  modified_base 3: mod_base = OTHER; note = 2'-O-methyladenosine-3'-phosphate
  modified_base 4: mod_base = OTHER; note = 2'-O-methyluridine-3'-phosphate
  modified_base 6: mod_base = OTHER; note = 2'-O-methyladenosine-3'-phosphate
  modified_base 7: mod_base = OTHER; note = guanosine-2'-phosphate
  modified_base 8: mod_base = OTHER; note = 2'-O-methylcytidine-3'-phosphate
  modified_base 9: mod_base = OTHER; note = 2'-O-methyluridine-3'-phosphate
  modified_base 10: mod_base = OTHER; note = 2'-O-methyladenosine-3'-phosphate
  modified_base 11: mod_base = OTHER; note = 2'-O-methylcytidine-3'-phosphate
  modified_base 12: mod_base = OTHER; note = 2'-O-methyluridine-3'-phosphate
  modified_base 13: mod_base = OTHER; note = 2'-O-methyluridine-3'-phosphate
  modified_base 14: mod_base = OTHER; note = 2'-deoxy-2'-fluoroguanosine-3'-phosphate
  modified_base 15: mod_base = OTHER; note = 2'-O-methyluridine-3'-phosphate
  modified_base 16: mod_base = OTHER; note = 2'-deoxy-2'-fluorouridine-3'-phosphate
  modified_base 17: mod_base = OTHER; note = 2'-O-methylcytidine-3'-phosphate
  modified_base 18: mod_base = OTHER; note = 2'-O-methyluridine-3'-phosphate
  modified_base 19: mod_base = OTHER; note = 2'-O-methyluridine-3'-phosphate
  modified_base 20: mod_base = OTHER; note = 2'-O-methylguanosine-3'-phosphate
  modified_base 21: mod_base = OTHER; note = 2'-O-methyladenosine-3'-phosphorothioate
  modified_base 22: mod_base = OTHER; note = 2'-O-methylguanosine-3'-phosphorothioate
  modified_base 23: mod_base = OTHER; note = 2'-O-methyluridine
  misc_feature 1..4: note = RNA
  misc_feature 6..23: note = RNA
  misc_feature 5: note = DNA
ttatcagctacttgttcttgagt

SEQ ID NO: 1290 - DNA, 23 bp, synthetic construct
  source 1..23: mol_type = other DNA
  modified_base 1: mod_base = OTHER; note = 2'-O-methyluridine-3'-phosphate 5'-(E)-Vinylphosphonate
  modified_base 2: mod_base = OTHER; note = 2'-deoxy-2'-fluorocytidine-3'-phosphate
  modified_base 3: mod_base = OTHER; note = 2'-O-methyluridine-3'-phosphate
  modified_base 4: mod_base = OTHER; note = 2'-O-methylguanosine-3'-phosphate
  modified_base 6: mod_base = OTHER; note = 2'-O-methylcytidine-3'-phosphate
  modified_base 7: mod_base = OTHER; note = cytidine-2'-phosphate
  modified_base 8: mod_base = OTHER; note = 2'-O-methyladenosine-3'-phosphate
  modified_base 9: mod_base = OTHER; note = 2'-O-methyluridine-3'-phosphate
  modified_base 10: mod_base = OTHER; note = 2'-O-methylcytidine-3'-phosphate
  modified_base 11: mod_base = OTHER; note = 2'-O-methyladenosine-3'-phosphate
  modified_base 12: mod_base = OTHER; note = 2'-O-methyladenosine-3'-phosphate
  modified_base 13: mod_base = OTHER; note = 2'-O-methyluridine-3'-phosphate
  modified_base 14: mod_base = OTHER; note = 2'-deoxy-2'-fluoroadenosine-3'-phosphate
  modified_base 15: mod_base = OTHER; note = 2'-O-methyluridine-3'-phosphate
  modified_base 16: mod_base = OTHER; note = 2'-deoxy-2'-fluorocytidine-3'-phosphate
  modified_base 17: mod_base = OTHER; note = 2'-O-methyladenosine-3'-phosphate
  modified_base 18: mod_base = OTHER; note = 2'-O-methylguanosine-3'-phosphate
  modified_base 19: mod_base = OTHER; note = 2'-O-methylcytidine-3'-phosphate
  modified_base 20: mod_base = OTHER; note = 2'-O-methyluridine-3'-phosphate
  modified_base 21: mod_base = OTHER; note = 2'-O-methyladenosine-3'-phosphorothioate
  modified_base 22: mod_base = OTHER; note = 2'-O-methylcytidine-3'-phosphorothioate
  modified_base 23: mod_base = OTHER; note = 2'-O-methyluridine
  misc_feature 1..4: note = RNA
  misc_feature 6..23: note = RNA
  misc_feature 5: note = DNA
tctgtccatcaatatcagctact

SEQ ID NO: 1291 - DNA, 23 bp, synthetic construct
  source 1..23: mol_type = other DNA
  modified_base 1: mod_base = OTHER; note = 2'-O-methyluridine-3'-phosphate 5'-(E)-Vinylphosphonate
  modified_base 2: mod_base = OTHER; note = 2'-deoxy-2'-fluoroadenosine-3'-phosphate
  modified_base 3: mod_base = OTHER; note = 2'-O-methylcytidine-3'-phosphate
  modified_base 4: mod_base = OTHER; note = 2'-O-methyluridine-3'-phosphate
  modified_base 6: mod_base = OTHER; note = 2'-O-methyluridine-3'-phosphate
  modified_base 7: mod_base = OTHER; note = cytidine-2'-phosphate
  modified_base 8: mod_base = OTHER; note = 2'-O-methylcytidine-3'-phosphate
  modified_base 9: mod_base = OTHER; note = 2'-O-methyladenosine-3'-phosphate
  modified_base 10: mod_base = OTHER; note = 2'-O-methyluridine-3'-phosphate
  modified_base 11: mod_base = OTHER; note = 2'-O-methylcytidine-3'-phosphate
  modified_base 12: mod_base = OTHER; note = 2'-O-methyladenosine-3'-phosphate
  modified_base 13: mod_base = OTHER; note = 2'-O-methyladenosine-3'-phosphate
  modified_base 14: mod_base = OTHER; note = 2'-deoxy-2'-fluorouridine-3'-phosphate
  modified_base 15: mod_base = OTHER; note = 2'-O-methyladenosine-3'-phosphate
  modified_base 16: mod_base = OTHER; note = 2'-deoxy-2'-fluorouridine-3'-phosphate
  modified_base 17: mod_base = OTHER; note = 2'-O-methylcytidine-3'-phosphate
  modified_base 18: mod_base = OTHER; note = 2'-O-methyladenosine-3'-phosphate
  modified_base 19: mod_base = OTHER; note = 2'-O-methylguanosine-3'-phosphate
  modified_base 20: mod_base = OTHER; note = 2'-O-methylcytidine-3'-phosphate
  modified_base 21: mod_base = OTHER; note = 2'-O-methyluridine-3'-phosphorothioate
  modified_base 22: mod_base = OTHER; note = 2'-O-methyladenosine-3'-phosphorothioate
  modified_base 23: mod_base = OTHER; note = 2'-O-methylcytidine
  misc_feature 1..4: note = RNA
  misc_feature 6..23: note = RNA
  misc_feature 5: note = DNA
tactgtccatcaatatcagctac

SEQ ID NO: 1292 - DNA, 23 bp, synthetic construct
  source 1..23: mol_type = other DNA
  modified_base 1: mod_base = OTHER; note = 2'-O-methyluridine-3'-phosphate 5'-(E)-Vinylphosphonate
  modified_base 2: mod_base = OTHER; note = 2'-deoxy-2'-fluoroadenosine-3'-phosphate
  modified_base 3: mod_base = OTHER; note = 2'-O-methyluridine-3'-phosphate
  modified_base 4: mod_base = OTHER; note = 2'-O-methyladenosine-3'-phosphate
  modified_base 6: mod_base = OTHER; note = 2'-O-methyluridine-3'-phosphate
  modified_base 7: mod_base = OTHER; note = guanosine-2'-phosphate
  modified_base 8: mod_base = OTHER; note = 2'-O-methyluridine-3'-phosphate
  modified_base 9: mod_base = OTHER; note = 2'-O-methylcytidine-3'-phosphate
  modified_base 10: mod_base = OTHER; note = 2'-O-methylcytidine-3'-phosphate
  modified_base 11: mod_base = OTHER; note = 2'-O-methyladenosine-3'-phosphate
  modified_base 12: mod_base = OTHER; note = 2'-O-methyluridine-3'-phosphate
  modified_base 13: mod_base = OTHER; note = 2'-O-methylcytidine-3'-phosphate
  modified_base 14: mod_base = OTHER; note = 2'-deoxy-2'-fluoroadenosine-3'-phosphate
  modified_base 15: mod_base = OTHER; note = 2'-O-methyladenosine-3'-phosphate
  modified_base 16: mod_base = OTHER; note = 2'-deoxy-2'-fluorouridine-3'-phosphate
  modified_base 17: mod_base = OTHER; note = 2'-O-methyladenosine-3'-phosphate
  modified_base 18: mod_base = OTHER; note = 2'-O-methyluridine-3'-phosphate
  modified_base 19: mod_base = OTHER; note = 2'-O-methylcytidine-3'-phosphate
  modified_base 20: mod_base = OTHER; note = 2'-O-methyladenosine-3'-phosphate
  modified_base 21: mod_base = OTHER; note = 2'-O-methylguanosine-3'-phosphorothioate
  modified_base 22: mod_base = OTHER; note = 2'-O-methylcytidine-3'-phosphorothioate
  modified_base 23: mod_base = OTHER; note = 2'-O-methyluridine
  misc_feature 1..4: note = RNA
  misc_feature 6..23: note = RNA
  misc_feature 5: note = DNA
tatactgtccatcaatatcagct

SEQ ID NO: 1293 - DNA, 23 bp, synthetic construct
  source 1..23: mol_type = other DNA
  modified_base 1: mod_base = OTHER; note = 2'-O-methyluridine-3'-phosphate 5'-(E)-Vinylphosphonate
  modified_base 2: mod_base = OTHER; note = 2'-deoxy-2'-fluorouridine-3'-phosphate
  modified_base 3: mod_base = OTHER; note = 2'-O-methylcytidine-3'-phosphate
  modified_base 4: mod_base = OTHER; note = 2'-O-methyladenosine-3'-phosphate
  modified_base 6: mod_base = OTHER; note = 2'-O-methyluridine-3'-phosphate
  modified_base 7: mod_base = OTHER; note = guanosine-2'-phosphate
  modified_base 8: mod_base = OTHER; note = 2'-O-methylcytidine-3'-phosphate
  modified_base 9: mod_base = OTHER; note = 2'-O-methyladenosine-3'-phosphate
  modified_base 10: mod_base = OTHER; note = 2'-O-methyluridine-3'-phosphate
  modified_base 11: mod_base = OTHER; note = 2'-O-methyladenosine-3'-phosphate
  modified_base 12: mod_base = OTHER; note = 2'-O-methylcytidine-3'-phosphate
  modified_base 13: mod_base = OTHER; note = 2'-O-methyluridine-3'-phosphate
  modified_base 14: mod_base = OTHER; note = 2'-deoxy-2'-fluoroguanosine-3'-phosphate
  modified_base 15: mod_base = OTHER; note = 2'-O-methyluridine-3'-phosphate
  modified_base 16: mod_base = OTHER; note = 2'-deoxy-2'-fluorocytidine-3'-phosphate
  modified_base 17: mod_base = OTHER; note = 2'-O-methylcytidine-3'-phosphate
  modified_base 18: mod_base = OTHER; note = 2'-O-methyladenosine-3'-phosphate
  modified_base 19: mod_base = OTHER; note = 2'-O-methyluridine-3'-phosphate
  modified_base 20: mod_base = OTHER; note = 2'-O-methylcytidine-3'-phosphate
  modified_base 21: mod_base = OTHER; note = 2'-O-methyladenosine-3'-phosphorothioate
  modified_base 22: mod_base = OTHER; note = 2'-O-methyladenosine-3'-phosphorothioate
  modified_base 23: mod_base = OTHER; note = 2'-O-methyluridine
  misc_feature 1..4: note = RNA
  misc_feature 6..23: note = RNA
  misc_feature 5: note = DNA
ttcattgcatactgtccatcaat

SEQ ID NO: 1294 - DNA, 23 bp, synthetic construct
  source 1..23: mol_type = other DNA
  modified_base 1: mod_base = OTHER; note = 2'-O-methyluridine-3'-phosphate 5'-(E)-Vinylphosphonate
  modified_base 2: mod_base = OTHER; note = 2'-deoxy-2'-fluoroadenosine-3'-phosphate
  modified_base 3: mod_base = OTHER; note = 2'-O-methylguanosine-3'-phosphate
  modified_base 4: mod_base = OTHER; note = 2'-O-methylcytidine-3'-phosphate
  modified_base 6: mod_base = OTHER; note = 2'-O-methylcytidine-3'-phosphate
  modified_base 7: mod_base = OTHER; note = guanosine-2'-phosphate
  modified_base 8: mod_base = OTHER; note = 2'-O-methyladenosine-3'-phosphate
  modified_base 9: mod_base = OTHER; note = 2'-O-methylguanosine-3'-phosphate
  modified_base 10: mod_base = OTHER; note = 2'-O-methyluridine-3'-phosphate
  modified_base 11: mod_base = OTHER; note = 2'-O-methylcytidine-3'-phosphate
  modified_base 12: mod_base = OTHER; note = 2'-O-methyladenosine-3'-phosphate
  modified_base 13: mod_base = OTHER; note = 2'-O-methyluridine-3'-phosphate
  modified_base 14: mod_base = OTHER; note = 2'-deoxy-2'-fluorouridine-3'-phosphate
  modified_base 15: mod_base = OTHER; note = 2'-O-methylguanosine-3'-phosphate
  modified_base 16: mod_base = OTHER; note = 2'-deoxy-2'-fluorocytidine-3'-phosphate
  modified_base 17: mod_base = OTHER; note = 2'-O-methyladenosine-3'-phosphate
  modified_base 18: mod_base = OTHER; note = 2'-O-methyluridine-3'-phosphate
  modified_base 19: mod_base = OTHER; note = 2'-O-methyladenosine-3'-phosphate
  modified_base 20: mod_base = OTHER; note = 2'-O-methylcytidine-3'-phosphate
  modified_base 21: mod_base = OTHER; note = 2'-O-methyluridine-3'-phosphorothioate
  modified_base 22: mod_base = OTHER; note = 2'-O-methylguanosine-3'-phosphorothioate
  modified_base 23: mod_base = OTHER; note = 2'-O-methyluridine
  misc_feature 1..4: note = RNA
  misc_feature 6..23: note = RNA
  misc_feature 5: note = DNA
tagctcgagtcattgcatactgt

SEQ ID NO: 1295 - DNA, 23 bp, synthetic construct
  source 1..23: mol_type = other DNA
  modified_base 1: mod_base = OTHER; note = 2'-O-methyluridine-3'-phosphate 5'-(E)-Vinylphosphonate
  modified_base 2: mod_base = OTHER; note = 2'-deoxy-2'-fluorocytidine-3'-phosphate
  modified_base 3: mod_base = OTHER; note = 2'-O-methyladenosine-3'-phosphate
  modified_base 4: mod_base = OTHER; note = 2'-O-methylguanosine-3'-phosphate
  modified_base 6: mod_base = OTHER; note = 2'-O-methyluridine-3'-phosphate
  modified_base 7: mod_base = OTHER; note = cytidine-2'-phosphate
  modified_base 8: mod_base = OTHER; note = 2'-O-methylguanosine-3'-phosphate
  modified_base 9: mod_base = OTHER; note = 2'-O-methyluridine-3'-phosphate
  modified_base 10: mod_base = OTHER; note = 2'-O-methyladenosine-3'-phosphate
  modified_base 11: mod_base = OTHER; note = 2'-O-methylcytidine-3'-phosphate
  modified_base 12: mod_base = OTHER; note = 2'-O-methylcytidine-3'-phosphate
  modified_base 13: mod_base = OTHER; note = 2'-O-methylcytidine-3'-phosphate
  modified_base 14: mod_base = OTHER; note = 2'-deoxy-2'-fluorouridine-3'-phosphate
  modified_base 15: mod_base = OTHER; note = 2'-O-methylcytidine-3'-phosphate
  modified_base 16: mod_base = OTHER; note = 2'-deoxy-2'-fluorouridine-3'-phosphate
  modified_base 17: mod_base = OTHER; note = 2'-O-methylguanosine-3'-phosphate
  modified_base 18: mod_base = OTHER; note = 2'-O-methyladenosine-3'-phosphate
  modified_base 19: mod_base = OTHER; note = 2'-O-methylguanosine-3'-phosphate
  modified_base 20: mod_base = OTHER; note = 2'-O-methylcytidine-3'-phosphate
  modified_base 21: mod_base = OTHER; note = 2'-O-methyluridine-3'-phosphorothioate
  modified_base 22: mod_base = OTHER; note = 2'-O-methylcytidine-3'-phosphorothioate
  modified_base 23: mod_base = OTHER; note = 2'-O-methylguanosine
  misc_feature 1..4: note = RNA
  misc_feature 6..23: note = RNA
  misc_feature 5: note = DNA
tcagctcgtaccctctgagctcg

SEQ ID NO: 1296 - DNA, 23 bp, synthetic construct
  source 1..23: mol_type = other DNA
  modified_base 1: mod_base = OTHER; note = 2'-O-methyluridine-3'-phosphate 5'-(E)-Vinylphosphonate
  modified_base 2: mod_base = OTHER; note = 2'-deoxy-2'-fluoroadenosine-3'-phosphate
  modified_base 3: mod_base = OTHER; note = 2'-O-methylguanosine-3'-phosphate
  modified_base 4: mod_base = OTHER; note = 2'-O-methylcytidine-3'-phosphate
  modified_base 6: mod_base = OTHER; note = 2'-O-methylguanosine-3'-phosphate
  modified_base 7: mod_base = OTHER; note = cytidine-2'-phosphate
  modified_base 8: mod_base = OTHER; note = 2'-O-methyluridine-3'-phosphate
  modified_base 9: mod_base = OTHER; note = 2'-O-methylcytidine-3'-phosphate
  modified_base 10: mod_base = OTHER; note = 2'-O-methylguanosine-3'-phosphate
  modified_base 11: mod_base = OTHER; note = 2'-O-methyluridine-3'-phosphate
  modified_base 12: mod_base = OTHER; note = 2'-O-methyladenosine-3'-phosphate
  modified_base 13: mod_base = OTHER; note = 2'-O-methylcytidine-3'-phosphate
  modified_base 14: mod_base = OTHER; note = 2'-deoxy-2'-fluorocytidine-3'-phosphate
  modified_base 15: mod_base = OTHER; note = 2'-O-methylcytidine-3'-phosphate
  modified_base 16: mod_base = OTHER; note = 2'-deoxy-2'-fluorouridine-3'-phosphate
  modified_base 17: mod_base = OTHER; note = 2'-O-methylcytidine-3'-phosphate
  modified_base 18: mod_base = OTHER; note = 2'-O-methyluridine-3'-phosphate
  modified_base 19: mod_base = OTHER; note = 2'-O-methylguanosine-3'-phosphate
  modified_base 20: mod_base = OTHER; note = 2'-O-methyladenosine-3'-phosphate
  modified_base 21: mod_base = OTHER; note = 2'-O-methylguanosine-3'-phosphorothioate
  modified_base 22: mod_base = OTHER; note = 2'-O-methylcytidine-3'-phosphorothioate
  modified_base 23: mod_base = OTHER; note = 2'-O-methyluridine
  misc_feature 1..4: note = RNA
  misc_feature 6..23: note = RNA
  misc_feature 5: note = DNA
tagcagctcgtaccctctgagct

SEQ ID NO: 1297 - DNA, 23 bp, synthetic construct
  source 1..23: mol_type = other DNA
  modified_base 1: mod_base = OTHER; note = 2'-O-methyluridine-3'-phosphate 5'-(E)-Vinylphosphonate
  modified_base 2: mod_base = OTHER; note = 2'-deoxy-2'-fluorocytidine-3'-phosphate
  modified_base 3: mod_base = OTHER; note = 2'-O-methyladenosine-3'-phosphate
  modified_base 4: mod_base = OTHER; note = 2'-O-methyluridine-3'-phosphate
  modified_base 6: mod_base = OTHER; note = 2'-O-methylguanosine-3'-phosphate
  modified_base 7: mod_base = OTHER; note = cytidine-2'-phosphate
  modified_base 8: mod_base = OTHER; note = 2'-O-methyladenosine-3'-phosphate
  modified_base 9: mod_base = OTHER; note = 2'-O-methylguanosine-3'-phosphate
  modified_base 10: mod_base = OTHER; note = 2'-O-methylcytidine-3'-phosphate
  modified_base 11: mod_base = OTHER; note = 2'-O-methyluridine-3'-phosphate
  modified_base 12: mod_base = OTHER; note = 2'-O-methylcytidine-3'-phosphate
  modified_base 13: mod_base = OTHER; note = 2'-O-methylguanosine-3'-phosphate
  modified_base 14: mod_base = OTHER; note = 2'-deoxy-2'-fluorouridine-3'-phosphate
  modified_base 15: mod_base = OTHER; note = 2'-O-methyladenosine-3'-phosphate
  modified_base 16: mod_base = OTHER; note = 2'-deoxy-2'-fluorocytidine-3'-phosphate
  modified_base 17: mod_base = OTHER; note = 2'-O-methylcytidine-3'-phosphate
  modified_base 18: mod_base = OTHER; note = 2'-O-methylcytidine-3'-phosphate
  modified_base 19: mod_base = OTHER; note = 2'-O-methyluridine-3'-phosphate
  modified_base 20: mod_base = OTHER; note = 2'-O-methylcytidine-3'-phosphate
  modified_base 21: mod_base = OTHER; note = 2'-O-methyluridine-3'-phosphorothioate
  modified_base 22: mod_base = OTHER; note = 2'-O-methylguanosine-3'-phosphorothioate
  modified_base 23: mod_base = OTHER; note = 2'-O-methyladenosine
  misc_feature 1..4: note = RNA
  misc_feature 6..23: note = RNA
  misc_feature 5: note = DNA
tcatagcagctcgtaccctctga

SEQ ID NO: 1298 - DNA, 23 bp, synthetic construct
  source 1..23: mol_type = other DNA
  modified_base 1: mod_base = OTHER; note = 2'-O-methyluridine-3'-phosphate 5'-(E)-Vinylphosphonate
  modified_base 2: mod_base = OTHER; note = 2'-deoxy-2'-fluoroadenosine-3'-phosphate
  modified_base 3: mod_base = OTHER; note = 2'-O-methyladenosine-3'-phosphate
  modified_base 4: mod_base = OTHER; note = 2'-O-methyluridine-3'-phosphate
  modified_base 6: mod_base = OTHER; note = 2'-O-methyluridine-3'-phosphate
  modified_base 7: mod_base = OTHER; note = cytidine-2'-phosphate
  modified_base 8: mod_base = OTHER; note = 2'-O-methyluridine-3'-phosphate
  modified_base 9: mod_base = OTHER; note = 2'-O-methylcytidine-3'-phosphate
  modified_base 10: mod_base = OTHER; note = 2'-O-methyladenosine-3'-phosphate
  modified_base 11: mod_base = OTHER; note = 2'-O-methylguanosine-3'-phosphate
  modified_base 12: mod_base = OTHER; note = 2'-O-methylguanosine-3'-phosphate
  modified_base 13: mod_base = OTHER; note = 2'-O-methylguanosine-3'-phosphate
  modified_base 14: mod_base = OTHER; note = 2'-deoxy-2'-fluoroadenosine-3'-phosphate
  modified_base 15: mod_base = OTHER; note = 2'-O-methyladenosine-3'-phosphate
  modified_base 16: mod_base = OTHER; note = 2'-deoxy-2'-fluorocytidine-3'-phosphate
  modified_base 17: mod_base = OTHER; note = 2'-O-methyladenosine-3'-phosphate
  modified_base 18: mod_base = OTHER; note = 2'-O-methyluridine-3'-phosphate
  modified_base 19: mod_base = OTHER; note = 2'-O-methyladenosine-3'-phosphate
  modified_base 20: mod_base = OTHER; note = 2'-O-methylguanosine-3'-phosphate
  modified_base 21: mod_base = OTHER; note = 2'-O-methylcytidine-3'-phosphorothioate
  modified_base 22: mod_base = OTHER; note = 2'-O-methyladenosine-3'-phosphorothioate
  modified_base 23: mod_base = OTHER; note = 2'-O-methylguanosine
  misc_feature 1..4: note = RNA
  misc_feature 6..23: note = RNA
  misc_feature 5: note = DNA
taatgtctcagggaacatagcag

SEQ ID NO: 1299 - DNA, 23 bp, synthetic construct
  source 1..23: mol_type = other DNA
  modified_base 1: mod_base = OTHER; note = 2'-O-methyluridine-3'-phosphate 5'-(E)-Vinylphosphonate
  modified_base 2: mod_base = OTHER; note = 2'-deoxy-2'-fluorouridine-3'-phosphate
  modified_base 3: mod_base = OTHER; note = 2'-O-methylguanosine-3'-phosphate
  modified_base 4: mod_base = OTHER; note = 2'-O-methyladenosine-3'-phosphate
  modified_base 6: mod_base = OTHER; note = 2'-O-methylguanosine-3'-phosphate
  modified_base 7: mod_base = OTHER; note = guanosine-2'-phosphate
  modified_base 8: mod_base = OTHER; note = 2'-O-methyluridine-3'-phosphate
  modified_base 9: mod_base = OTHER; note = 2'-O-methyluridine-3'-phosphate
  modified_base 10: mod_base = OTHER; note = 2'-O-methylcytidine-3'-phosphate
  modified_base 11: mod_base = OTHER; note = 2'-O-methyladenosine-3'-phosphate
  modified_base 12: mod_base = OTHER; note = 2'-O-methylguanosine-3'-phosphate
  modified_base 13: mod_base = OTHER; note = 2'-O-methylcytidine-3'-phosphate
  modified_base 14: mod_base = OTHER; note = 2'-deoxy-2'-fluorocytidine-3'-phosphate
  modified_base 15: mod_base = OTHER; note = 2'-O-methyladenosine-3'-phosphate
  modified_base 16: mod_base = OTHER; note = 2'-deoxy-2'-fluoroadenosine-3'-phosphate
  modified_base 17: mod_base = OTHER; note = 2'-O-methyladenosine-3'-phosphate
  modified_base 18: mod_base = OTHER; note = 2'-O-methylcytidine-3'-phosphate
  modified_base 19: mod_base = OTHER; note = 2'-O-methylguanosine-3'-phosphate
  modified_base 20: mod_base = OTHER; note = 2'-O-methylcytidine-3'-phosphate
  modified_base 21: mod_base = OTHER; note = 2'-O-methyluridine-3'-phosphorothioate
  modified_base 22: mod_base = OTHER; note = 2'-O-methylguanosine-3'-phosphorothioate
  modified_base 23: mod_base = OTHER; note = 2'-O-methylguanosine
  misc_feature 1..4: note = RNA
  misc_feature 6..23: note = RNA
  misc_feature 5: note = DNA
ttgatggttcagccaaacgctgg

SEQ ID NO: 1300 - DNA, 23 bp, synthetic construct
  source 1..23: mol_type = other DNA
  modified_base 1: mod_base = OTHER; note = 2'-O-methyluridine-3'-phosphate 5'-(E)-Vinylphosphonate
  modified_base 2: mod_base = OTHER; note = 2'-deoxy-2'-fluorouridine-3'-phosphate
  modified_base 3: mod_base = OTHER; note = 2'-O-methyladenosine-3'-phosphate
  modified_base 4: mod_base = OTHER; note = 2'-O-methylcytidine-3'-phosphate
  modified_base 6: mod_base = OTHER; note = 2'-O-methyladenosine-3'-phosphate
  modified_base 7: mod_base = OTHER; note = cytidine-2'-phosphate
  modified_base 8: mod_base = OTHER; note = 2'-O-methyluridine-3'-phosphate
  modified_base 9: mod_base = OTHER; note = 2'-O-methylguanosine-3'-phosphate
  modified_base 10: mod_base = OTHER; note = 2'-O-methylcytidine-3'-phosphate
  modified_base 11: mod_base = OTHER; note = 2'-O-methyladenosine-3'-phosphate
  modified_base 12: mod_base = OTHER; note = 2'-O-methyluridine-3'-phosphate
  modified_base 13: mod_base = OTHER; note = 2'-O-methylguanosine-3'-phosphate
  modified_base 14: mod_base = OTHER; note = 2'-deoxy-2'-fluorouridine-3'-phosphate
  modified_base 15: mod_base = OTHER; note = 2'-O-methyluridine-3'-phosphate
  modified_base 16: mod_base = OTHER; note = 2'-deoxy-2'-fluorouridine-3'-phosphate
  modified_base 17: mod_base = OTHER; note = 2'-O-methylcytidine-3'-phosphate
  modified_base 18: mod_base = OTHER; note = 2'-O-methyladenosine-3'-phosphate
  modified_base 19: mod_base = OTHER; note = 2'-O-methylguanosine-3'-phosphate
  modified_base 20: mod_base = OTHER; note = 2'-O-methylcytidine-3'-phosphate
  modified_base 21: mod_base = OTHER; note = 2'-O-methyladenosine-3'-phosphorothioate
  modified_base 22: mod_base = OTHER; note = 2'-O-methyluridine-3'-phosphorothioate
  modified_base 23: mod_base = OTHER; note = 2'-O-methylcytidine
  misc_feature 1..4: note = RNA
  misc_feature 6..23: note = RNA
  misc_feature 5: note = DNA
ttacaactgcatgtttcagcatc

SEQ ID NO: 1301 - DNA, 23 bp, synthetic construct
  source 1..23: mol_type = other DNA
  modified_base 1: mod_base = OTHER; note = 2'-O-methyluridine-3'-phosphate 5'-(E)-Vinylphosphonate
  modified_base 2: mod_base = OTHER; note = 2'-deoxy-2'-fluoroadenosine-3'-phosphate
  modified_base 3: mod_base = OTHER; note = 2'-O-methyluridine-3'-phosphate
  modified_base 4: mod_base = OTHER; note = 2'-O-methylcytidine-3'-phosphate
  modified_base 6: mod_base = OTHER; note = 2'-O-methyladenosine-3'-phosphate
  modified_base 7: mod_base = OTHER; note = guanosine-2'-phosphate
  modified_base 8: mod_base = OTHER; note = 2'-O-methyluridine-3'-phosphate
  modified_base 9: mod_base = OTHER; note = 2'-O-methyluridine-3'-phosphate
  modified_base 10: mod_base = OTHER; note = 2'-O-methyluridine-3'-phosphate
  modified_base 11: mod_base = OTHER; note = 2'-O-methyladenosine-3'-phosphate
  modified_base 12: mod_base = OTHER; note = 2'-O-methylcytidine-3'-phosphate
  modified_base 13: mod_base = OTHER; note = 2'-O-methyladenosine-3'-phosphate
  modified_base 14: mod_base = OTHER; note = 2'-deoxy-2'-fluoroadenosine-3'-phosphate
  modified_base 15: mod_base = OTHER; note = 2'-O-methylcytidine-3'-phosphate
  modified_base 16: mod_base = OTHER; note = 2'-deoxy-2'-fluorouridine-3'-phosphate
  modified_base 17: mod_base = OTHER; note = 2'-O-methylguanosine-3'-phosphate
  modified_base 18: mod_base = OTHER; note = 2'-O-methylcytidine-3'-phosphate
  modified_base 19: mod_base = OTHER; note = 2'-O-methyladenosine-3'-phosphate
  modified_base 20: mod_base = OTHER; note = 2'-O-methyluridine-3'-phosphate
  modified_base 21: mod_base = OTHER; note = 2'-O-methylguanosine-3'-phosphorothioate
  modified_base 22: mod_base = OTHER; note = 2'-O-methyluridine-3'-phosphorothioate
  modified_base 23: mod_base = OTHER; note = 2'-O-methyluridine
  misc_feature 1..4: note = RNA
  misc_feature 6..23: note = RNA
  misc_feature 5: note = DNA
tatcaagtttacaactgcatgtt

SEQ ID NO: 1302 - DNA, 23 bp, synthetic construct
  source 1..23: mol_type = other DNA
  modified_base 1: mod_base = OTHER; note = 2'-O-methyluridine-3'-phosphate 5'-(E)-Vinylphosphonate
  modified_base 2: mod_base = OTHER; note = 2'-deoxy-2'-fluorouridine-3'-phosphate
  modified_base 3: mod_base = OTHER; note = 2'-O-methyluridine-3'-phosphate
  modified_base 4: mod_base = OTHER; note = 2'-O-methyladenosine-3'-phosphate
  modified_base 6: mod_base = OTHER; note = 2'-O-methyluridine-3'-phosphate
  modified_base 7: mod_base = OTHER; note = cytidine-2'-phosphate
  modified_base 8: mod_base = OTHER; note = 2'-O-methyladenosine-3'-phosphate
  modified_base 9: mod_base = OTHER; note = 2'-O-methyladenosine-3'-phosphate
  modified_base 10: mod_base = OTHER; note = 2'-O-methylguanosine-3'-phosphate
  modified_base 11: mod_base = OTHER; note = 2'-O-methyluridine-3'-phosphate
  modified_base 12: mod_base = OTHER; note = 2'-O-methyluridine-3'-phosphate
  modified_base 13: mod_base = OTHER; note = 2'-O-methyluridine-3'-phosphate
  modified_base 14: mod_base = OTHER; note = 2'-deoxy-2'-fluoroadenosine-3'-phosphate
  modified_base 15: mod_base = OTHER; note = 2'-O-methylcytidine-3'-phosphate
  modified_base 16: mod_base = OTHER; note = 2'-deoxy-2'-fluoroadenosine-3'-phosphate
  modified_base 17: mod_base = OTHER; note = 2'-O-methyladenosine-3'-phosphate
  modified_base 18: mod_base = OTHER; note = 2'-O-methylcytidine-3'-phosphate
  modified_base 19: mod_base = OTHER; note = 2'-O-methyluridine-3'-phosphate
  modified_base 20: mod_base = OTHER; note = 2'-O-methylguanosine-3'-phosphate
  modified_base 21: mod_base = OTHER; note = 2'-O-methylcytidine-3'-phosphorothioate
  modified_base 22: mod_base = OTHER; note = 2'-O-methyladenosine-3'-phosphorothioate
  modified_base 23: mod_base = OTHER; note = 2'-O-methyluridine
  misc_feature 1..4: note = RNA
  misc_feature 6..23: note = RNA
  misc_feature 5: note = DNA
tttaatcaagtttacaactgcat

SEQ ID NO: 1303 - DNA, 23 bp, synthetic construct
  source 1..23: mol_type = other DNA
  modified_base 1: mod_base = OTHER; note = 2'-O-methyluridine-3'-phosphate 5'-(E)-Vinylphosphonate
  modified_base 2: mod_base = OTHER; note = 2'-deoxy-2'-fluoroadenosine-3'-phosphate
  modified_base 3: mod_base = OTHER; note = 2'-O-methyluridine-3'-phosphate
  modified_base 4: mod_base = OTHER; note = 2'-O-methylcytidine-3'-phosphate
  modified_base 6: mod_base = OTHER; note = 2'-O-methyluridine-3'-phosphate
  modified_base 7: mod_base = OTHER; note = cytidine-2'-phosphate
  modified_base 8: mod_base = OTHER; note = 2'-O-methyluridine-3'-phosphate
  modified_base 9: mod_base = OTHER; note = 2'-O-methyluridine-3'-phosphate
  modified_base 10: mod_base = OTHER; note = 2'-O-methylguanosine-3'-phosphate
  modified_base 11: mod_base = OTHER; note = 2'-O-methyladenosine-3'-phosphate
  modified_base 12: mod_base = OTHER; note = 2'-O-methyluridine-3'-phosphate
  modified_base 13: mod_base = OTHER; note = 2'-O-methyladenosine-3'-phosphate
  modified_base 14: mod_base = OTHER; note = 2'-deoxy-2'-fluoroguanosine-3'-phosphate
  modified_base 15: mod_base = OTHER; note = 2'-O-methyluridine-3'-phosphate
  modified_base 16: mod_base = OTHER; note = 2'-deoxy-2'-fluorouridine-3'-phosphate
  modified_base 17: mod_base = OTHER; note = 2'-O-methyladenosine-3'-phosphate
  modified_base 18: mod_base = OTHER; note = 2'-O-methyladenosine-3'-phosphate
  modified_base 19: mod_base = OTHER; note = 2'-O-methyluridine-3'-phosphate
  modified_base 20: mod_base = OTHER; note = 2'-O-methylcytidine-3'-phosphate
  modified_base 21: mod_base = OTHER; note = 2'-O-methyladenosine-3'-phosphorothioate
  modified_base 22: mod_base = OTHER; note = 2'-O-methyladenosine-3'-phosphorothioate
  modified_base 23: mod_base = OTHER; note = 2'-O-methylguanosine
  misc_feature 1..4: note = RNA
  misc_feature 6..23: note = RNA
  misc_feature 5: note = DNA
tatcatcttgatagttaatcaag

SEQ ID NO: 1304 - DNA, 23 bp, synthetic construct
  source 1..23: mol_type = other DNA
  modified_base 1: mod_base = OTHER; note = 2'-O-methyluridine-3'-phosphate 5'-(E)-Vinylphosphonate
  modified_base 2: mod_base = OTHER; note = 2'-deoxy-2'-fluorouridine-3'-phosphate
  modified_base 3: mod_base = OTHER; note = 2'-O-methylguanosine-3'-phosphate
  modified_base 4: mod_base = OTHER; note = 2'-O-methylcytidine-3'-phosphate
  modified_base 6: mod_base = OTHER; note = 2'-O-methylcytidine-3'-phosphate
  modified_base 7: mod_base = OTHER; note = guanosine-2'-phosphate
  modified_base 8: mod_base = OTHER; note = 2'-O-methyluridine-3'-phosphate
  modified_base 9: mod_base = OTHER; note = 2'-O-methylguanosine-3'-phosphate
  modified_base 10: mod_base = OTHER; note = 2'-O-methyluridine-3'-phosphate
  modified_base 11: mod_base = OTHER; note = 2'-O-methylguanosine-3'-phosphate
  modified_base 12: mod_base = OTHER; note = 2'-O-methylguanosine-3'-phosphate
  modified_base 13: mod_base = OTHER; note = 2'-O-methylcytidine-3'-phosphate
  modified_base 14: mod_base = OTHER; note = 2'-deoxy-2'-fluoroadenosine-3'-phosphate
  modified_base 15: mod_base = OTHER; note = 2'-O-methyladenosine-3'-phosphate
  modified_base 16: mod_base = OTHER; note = 2'-deoxy-2'-fluoroguanosine-3'-phosphate
  modified_base 17: mod_base = OTHER; note = 2'-O-methyluridine-3'-phosphate
  modified_base 18: mod_base = OTHER; note = 2'-O-methyluridine-3'-phosphate
  modified_base 19: mod_base = OTHER; note = 2'-O-methylcytidine-3'-phosphate
  modified_base 20: mod_base = OTHER; note = 2'-O-methyluridine-3'-phosphate
  modified_base 21: mod_base = OTHER; note = 2'-O-methylguanosine-3'-phosphorothioate
  modified_base 22: mod_base = OTHER; note = 2'-O-methylcytidine-3'-phosphorothioate
  modified_base 23: mod_base = OTHER; note = 2'-O-methyladenosine
  misc_feature 1..4: note = RNA
  misc_feature 6..23: note = RNA
  misc_feature 5: note = DNA
ttgcacgtgtggcaagttctgca

SEQ ID NO: 1305 - DNA, 23 bp, synthetic construct
  source 1..23: mol_type = other DNA
  modified_base 1: mod_base = OTHER; note = 2'-O-methyluridine-3'-phosphate 5'-(E)-Vinylphosphonate
  modified_base 2: mod_base = OTHER; note = 2'-deoxy-2'-fluoroguanosine-3'-phosphate
  modified_base 3: mod_base = OTHER; note = 2'-O-methyluridine-3'-phosphate
  modified_base 4: mod_base = OTHER; note = 2'-O-methyluridine-3'-phosphate
  modified_base 6: mod_base = OTHER; note = 2'-O-methyladenosine-3'-phosphate
  modified_base 7: mod_base = OTHER; note = guanosine-2'-phosphate
  modified_base 8: mod_base = OTHER; note = 2'-O-methylguanosine-3'-phosphate
  modified_base 9: mod_base = OTHER; note = 2'-O-methylguanosine-3'-phosphate
  modified_base 10: mod_base = OTHER; note = 2'-O-methyladenosine-3'-phosphate
  modified_base 11: mod_base = OTHER; note = 2'-O-methyluridine-3'-phosphate
  modified_base 12: mod_base = OTHER; note = 2'-O-methyluridine-3'-phosphate
  modified_base 13: mod_base = OTHER; note = 2'-O-methylguanosine-3'-phosphate
  modified_base 14: mod_base = OTHER; note = 2'-deoxy-2'-fluorocytidine-3'-phosphate
  modified_base 15: mod_base = OTHER; note = 2'-O-methyladenosine-3'-phosphate
  modified_base 16: mod_base = OTHER; note = 2'-deoxy-2'-fluorocytidine-3'-phosphate
  modified_base 17: mod_base = OTHER; note = 2'-O-methylguanosine-3'-phosphate
  modified_base 18: mod_base = OTHER; note = 2'-O-methyluridine-3'-phosphate
  modified_base 19: mod_base = OTHER; note = 2'-O-methylguanosine-3'-phosphate
  modified_base 20: mod_base = OTHER; note = 2'-O-methyluridine-3'-phosphate
  modified_base 21: mod_base = OTHER; note = 2'-O-methylguanosine-3'-phosphorothioate
  modified_base 22: mod_base = OTHER; note = 2'-O-methylguanosine-3'-phosphorothioate
  modified_base 23: mod_base = OTHER; note = 2'-O-methylcytidine
  misc_feature 1..4: note = RNA
  misc_feature 6..23: note = RNA
  misc_feature 5: note = DNA
tgttcagggattgcacgtgtggc

SEQ ID NO: 1306 - DNA, 23 bp, synthetic construct
  source 1..23: mol_type = other DNA
  modified_base 1: mod_base = OTHER; note = 2'-O-methyluridine-3'-phosphate 5'-(E)-Vinylphosphonate
  modified_base 2: mod_base = OTHER; note = 2'-deoxy-2'-fluorouridine-3'-phosphate
  modified_base 3: mod_base = OTHER; note = 2'-O-methylguanosine-3'-phosphate
  modified_base 4: mod_base = OTHER; note = 2'-O-methyluridine-3'-phosphate
  modified_base 6: mod_base = OTHER; note = 2'-O-methyladenosine-3'-phosphate
  modified_base 7: mod_base = OTHER; note = guanosine-2'-phosphate
  modified_base 8: mod_base = OTHER; note = 2'-O-methyluridine-3'-phosphate
  modified_base 9: mod_base = OTHER; note = 2'-O-methyluridine-3'-phosphate
  modified_base 10: mod_base = OTHER; note = 2'-O-methylcytidine-3'-phosphate
  modified_base 11: mod_base = OTHER; note = 2'-O-methyladenosine-3'-phosphate
  modified_base 12: mod_base = OTHER; note = 2'-O-methylguanosine-3'-phosphate
  modified_base 13: mod_base = OTHER; note = 2'-O-methylguanosine-3'-phosphate
  modified_base 14: mod_base = OTHER; note = 2'-deoxy-2'-fluoroguanosine-3'-phosphate
  modified_base 15: mod_base = OTHER; note = 2'-O-methyladenosine-3'-phosphate
  modified_base 16: mod_base = OTHER; note = 2'-deoxy-2'-fluorouridine-3'-phosphate
  modified_base 17: mod_base = OTHER; note = 2'-O-methyluridine-3'-phosphate
  modified_base 18: mod_base = OTHER; note = 2'-O-methylguanosine-3'-phosphate
  modified_base 19: mod_base = OTHER; note = 2'-O-methylcytidine-3'-phosphate
  modified_base 20: mod_base = OTHER; note = 2'-O-methyladenosine-3'-phosphate
  modified_base 21: mod_base = OTHER; note = 2'-O-methylcytidine-3'-phosphorothioate
  modified_base 22: mod_base = OTHER; note = 2'-O-methylguanosine-3'-phosphorothioate
  modified_base 23: mod_base = OTHER; note = 2'-O-methyluridine
  misc_feature 1..4: note = RNA
  misc_feature 6..23: note = RNA
  misc_feature 5: note = DNA
ttgtcagttcagggattgcacgt

SEQ ID NO: 1307 - DNA, 23 bp, synthetic construct
  source 1..23: mol_type = other DNA
  modified_base 1: mod_base = OTHER; note = 2'-O-methyluridine-3'-phosphate 5'-(E)-Vinylphosphonate
  modified_base 2: mod_base = OTHER; note = 2'-deoxy-2'-fluorouridine-3'-phosphate
  modified_base 3: mod_base = OTHER; note = 2'-O-methyluridine-3'-phosphate
  modified_base 4: mod_base = OTHER; note = 2'-O-methyladenosine-3'-phosphate
  modified_base 6: mod_base = OTHER; note = 2'-O-methylcytidine-3'-phosphate
  modified_base 7: mod_base = OTHER; note = cytidine-2'-phosphate
  modified_base 8: mod_base = OTHER; note = 2'-O-methyladenosine-3'-phosphate
  modified_base 9: mod_base = OTHER; note = 2'-O-methylcytidine-3'-phosphate
  modified_base 10: mod_base = OTHER; note = 2'-O-methylcytidine-3'-phosphate
  modified_base 11: mod_base = OTHER; note = 2'-O-methyladenosine-3'-phosphate
  modified_base 12: mod_base = OTHER; note = 2'-O-methylcytidine-3'-phosphate
  modified_base 13: mod_base = OTHER; note = 2'-O-methylcytidine-3'-phosphate
  modified_base 14: mod_base = OTHER; note = 2'-deoxy-2'-fluorouridine-3'-phosphate
  modified_base 15: mod_base = OTHER; note = 2'-O-methylguanosine-3'-phosphate
  modified_base 16: mod_base = OTHER; note = 2'-deoxy-2'-fluoroguanosine-3'-phosphate
  modified_base 17: mod_base = OTHER; note = 2'-O-methyluridine-3'-phosphate
  modified_base 18: mod_base = OTHER; note = 2'-O-methylcytidine-3'-phosphate
  modified_base 19: mod_base = OTHER; note = 2'-O-methylcytidine-3'-phosphate
  modified_base 20: mod_base = OTHER; note = 2'-O-methyluridine-3'-phosphate
  modified_base 21: mod_base = OTHER; note = 2'-O-methylcytidine-3'-phosphorothioate
  modified_base 22: mod_base = OTHER; note = 2'-O-methylguanosine-3'-phosphorothioate
  modified_base 23: mod_base = OTHER; note = 2'-O-methyluridine
  misc_feature 1..4: note = RNA
  misc_feature 6..23: note = RNA
  misc_feature 5: note = DNA
tttaaccaccacctggtcctcgt

SEQ ID NO: 1308 - DNA, 23 bp, synthetic construct
  source 1..23: mol_type = other DNA
  modified_base 1: mod_base = OTHER; note = 2'-O-methyluridine-3'-phosphate 5'-(E)-Vinylphosphonate
  modified_base 2: mod_base = OTHER; note = 2'-deoxy-2'-fluoroguanosine-3'-phosphate
  modified_base 3: mod_base = OTHER; note = 2'-O-methylcytidine-3'-phosphate
  modified_base 4: mod_base = OTHER; note = 2'-O-methyladenosine-3'-phosphate
  modified_base 6: mod_base = OTHER; note = 2'-O-methylcytidine-3'-phosphate
  modified_base 7: mod_base = OTHER; note = cytidine-2'-phosphate
  modified_base 8: mod_base = OTHER; note = 2'-O-methyluridine-3'-phosphate
  modified_base 9: mod_base = OTHER; note = 2'-O-methyluridine-3'-phosphate
  modified_base 10: mod_base = OTHER; note = 2'-O-methyladenosine-3'-phosphate
  modified_base 11: mod_base = OTHER; note = 2'-O-methyluridine-3'-phosphate
  modified_base 12: mod_base = OTHER; note = 2'-O-methyluridine-3'-phosphate
  modified_base 13: mod_base = OTHER; note = 2'-O-methyladenosine-3'-phosphate
  modified_base 14: mod_base = OTHER; note = 2'-deoxy-2'-fluoroadenosine-3'-phosphate
  modified_base 15: mod_base = OTHER; note = 2'-O-methylcytidine-3'-phosphate
  modified_base 16: mod_base = OTHER; note = 2'-deoxy-2'-fluorocytidine-3'-phosphate
  modified_base 17: mod_base = OTHER; note = 2'-O-methyladenosine-3'-phosphate
  modified_base 18: mod_base = OTHER; note = 2'-O-methylcytidine-3'-phosphate
  modified_base 19: mod_base = OTHER; note = 2'-O-methylcytidine-3'-phosphate
  modified_base 20: mod_base = OTHER; note = 2'-O-methyladenosine-3'-phosphate
  modified_base 21: mod_base = OTHER; note = 2'-O-methylcytidine-3'-phosphorothioate
  modified_base 22: mod_base = OTHER; note = 2'-O-methylcytidine-3'-phosphorothioate
  modified_base 23: mod_base = OTHER; note = 2'-O-methyluridine
  misc_feature 1..4: note = RNA
  misc_feature 6..23: note = RNA
  misc_feature 5: note = DNA
tgcagccttattaaccaccacct

SEQ ID NO: 1309 - DNA, 23 bp, synthetic construct
  source 1..23: mol_type = other DNA
  modified_base 1: mod_base = OTHER; note = 2'-O-methyluridine-3'-phosphate 5'-(E)-Vinylphosphonate
  modified_base 2: mod_base = OTHER; note = 2'-deoxy-2'-fluorouridine-3'-phosphate
  modified_base 3: mod_base = OTHER; note = 2'-O-methyladenosine-3'-phosphate
  modified_base 4: mod_base = OTHER; note = 2'-O-methylcytidine-3'-phosphate
  modified_base 6: mod_base = OTHER; note = 2'-O-methyluridine-3'-phosphate
  modified_base 7: mod_base = OTHER; note = cytidine-2'-phosphate
  modified_base 8: mod_base = OTHER; note = 2'-O-methyladenosine-3'-phosphate
  modified_base 9: mod_base = OTHER; note = 2'-O-methyluridine-3'-phosphate
  modified_base 10: mod_base = OTHER; note = 2'-O-methyluridine-3'-phosphate
  modified_base 11: mod_base = OTHER; note = 2'-O-methyluridine-3'-phosphate
  modified_base 12: mod_base = OTHER; note = 2'-O-methylguanosine-3'-phosphate
  modified_base 13: mod_base = OTHER; note = 2'-O-methyluridine-3'-phosphate
  modified_base 14: mod_base = OTHER; note = 2'-deoxy-2'-fluoroadenosine-3'-phosphate
  modified_base 15: mod_base = OTHER; note = 2'-O-methyluridine-3'-phosphate
  modified_base 16: mod_base = OTHER; note = 2'-deoxy-2'-fluorouridine-3'-phosphate
  modified_base 17: mod_base = OTHER; note = 2'-O-methylcytidine-3'-phosphate
  modified_base 18: mod_base = OTHER; note = 2'-O-methyluridine-3'-phosphate
  modified_base 19: mod_base = OTHER; note = 2'-O-methylguanosine-3'-phosphate
  modified_base 20: mod_base = OTHER; note = 2'-O-methylcytidine-3'-phosphate
  modified_base 21: mod_base = OTHER; note = 2'-O-methyladenosine-3'-phosphorothioate
  modified_base 22: mod_base = OTHER; note = 2'-O-methyluridine-3'-phosphorothioate
  modified_base 23: mod_base = OTHER; note = 2'-O-methylguanosine
  misc_feature 1..4: note = RNA
  misc_feature 6..23: note = RNA
  misc_feature 5: note = DNA
ttacatcatttgtattctgcatg

SEQ ID NO: 1310 - DNA, 23 bp, synthetic construct
  source 1..23: mol_type = other DNA
  modified_base 1: mod_base = OTHER; note = 2'-O-methyluridine-3'-phosphate 5'-(E)-Vinylphosphonate
  modified_base 2: mod_base = OTHER; note = 2'-deoxy-2'-fluorouridine-3'-phosphate
  modified_base 3: mod_base = OTHER; note = 2'-O-methyluridine-3'-phosphate
  modified_base 4: mod_base = OTHER; note = 2'-O-methylcytidine-3'-phosphate
  modified_base 6: mod_base = OTHER; note = 2'-O-methyladenosine-3'-phosphate
  modified_base 7: mod_base = OTHER; note = cytidine-2'-phosphate
  modified_base 8: mod_base = OTHER; note = 2'-O-methyladenosine-3'-phosphate
  modified_base 9: mod_base = OTHER; note = 2'-O-methyluridine-3'-phosphate
  modified_base 10: mod_base = OTHER; note = 2'-O-methylcytidine-3'-phosphate
  modified_base 11: mod_base = OTHER; note = 2'-O-methyladenosine-3'-phosphate
  modified_base 12: mod_base = OTHER; note = 2'-O-methyluridine-3'-phosphate
  modified_base 13: mod_base = OTHER; note = 2'-O-methyluridine-3'-phosphate
  modified_base 14: mod_base = OTHER; note = 2'-deoxy-2'-fluorouridine-3'-phosphate
  modified_base 15: mod_base = OTHER; note = 2'-O-methylguanosine-3'-phosphate
  modified_base 16: mod_base = OTHER; note = 2'-deoxy-2'-fluorouridine-3'-phosphate
  modified_base 17: mod_base = OTHER; note = 2'-O-methyladenosine-3'-phosphate
  modified_base 18: mod_base = OTHER; note = 2'-O-methyluridine-3'-phosphate
  modified_base 19: mod_base = OTHER; note = 2'-O-methyluridine-3'-phosphate
  modified_base 20: mod_base = OTHER; note = 2'-O-methylcytidine-3'-phosphate
  modified_base 21: mod_base = OTHER; note = 2'-O-methyluridine-3'-phosphorothioate
  modified_base 22: mod_base = OTHER; note = 2'-O-methylguanosine-3'-phosphorothioate
  modified_base 23: mod_base = OTHER; note = 2'-O-methylcytidine
  misc_feature 1..4: note = RNA
  misc_feature 6..23: note = RNA
  misc_feature 5: note = DNA
tttctacatcatttgtattctgc

SEQ ID NO: 1311 - DNA, 23 bp, synthetic construct
  source 1..23: mol_type = other DNA
  modified_base 1: mod_base = OTHER; note = 2'-O-methyluridine-3'-phosphate 5'-(E)-Vinylphosphonate
  modified_base 2: mod_base = OTHER; note = 2'-deoxy-2'-fluoroadenosine-3'-phosphate
  modified_base 3: mod_base = OTHER; note = 2'-O-methyladenosine-3'-phosphate
  modified_base 4: mod_base = OTHER; note = 2'-O-methylcytidine-3'-phosphate
  modified_base 6: mod_base = OTHER; note = 2'-O-methyladenosine-3'-phosphate
  modified_base 7: mod_base = OTHER; note = guanosine-2'-phosphate
  modified_base 8: mod_base = OTHER; note = 2'-O-methylcytidine-3'-phosphate
  modified_base 9: mod_base = OTHER; note = 2'-O-methyluridine-3'-phosphate
  modified_base 10: mod_base = OTHER; note = 2'-O-methylguanosine-3'-phosphate
  modified_base 11: mod_base = OTHER; note = 2'-O-methyluridine-3'-phosphate
  modified_base 12: mod_base = OTHER; note = 2'-O-methyluridine-3'-phosphate
  modified_base 13: mod_base = OTHER; note = 2'-O-methyluridine-3'-phosphate
  modified_base 14: mod_base = OTHER; note = 2'-deoxy-2'-fluorocytidine-3'-phosphate
  modified_base 15: mod_base = OTHER; note = 2'-O-methyluridine-3'-phosphate
  modified_base 16: mod_base = OTHER; note = 2'-deoxy-2'-fluoroadenosine-3'-phosphate
  modified_base 17: mod_base = OTHER; note = 2'-O-methylcytidine-3'-phosphate
  modified_base 18: mod_base = OTHER; note = 2'-O-methyladenosine-3'-phosphate
  modified_base 19: mod_base = OTHER; note = 2'-O-methyluridine-3'-phosphate
  modified_base 20: mod_base = OTHER; note = 2'-O-methylcytidine-3'-phosphate
  modified_base 21: mod_base = OTHER; note = 2'-O-methyladenosine-3'-phosphorothioate
  modified_base 22: mod_base = OTHER; note = 2'-O-methyluridine-3'-phosphorothioate
  modified_base 23: mod_base = OTHER; note = 2'-O-methyluridine
  misc_feature 1..4: note = RNA
  misc_feature 6..23: note = RNA
  misc_feature 5: note = DNA
taacgagctgtttctacatcatt

SEQ ID NO: 1312 - DNA, 23 bp, synthetic construct
  source 1..23: mol_type = other DNA
  modified_base 1: mod_base = OTHER; note = 2'-O-methyluridine-3'-phosphate 5'-(E)-Vinylphosphonate
  modified_base 2: mod_base = OTHER; note = 2'-deoxy-2'-fluoroguanosine-3'-phosphate
  modified_base 3: mod_base = OTHER; note = 2'-O-methyladenosine-3'-phosphate
  modified_base 4: mod_base = OTHER; note = 2'-O-methyluridine-3'-phosphate
  modified_base 6: mod_base = OTHER; note = 2'-O-methylguanosine-3'-phosphate
  modified_base 7: mod_base = OTHER; note = guanosine-2'-phosphate
  modified_base 8: mod_base = OTHER; note = 2'-O-methyladenosine-3'-phosphate
  modified_base 9: mod_base = OTHER; note = 2'-O-methyladenosine-3'-phosphate
  modified_base 10: mod_base = OTHER; note = 2'-O-methyladenosine-3'-phosphate
  modified_base 11: mod_base = OTHER; note = 2'-O-methylguanosine-3'-phosphate
  modified_base 12: mod_base = OTHER; note = 2'-O-methylguanosine-3'-phosphate
  modified_base 13: mod_base = OTHER; note = 2'-O-methyluridine-3'-phosphate
  modified_base 14: mod_base = OTHER; note = 2'-deoxy-2'-fluorouridine-3'-phosphate
  modified_base 15: mod_base = OTHER; note = 2'-O-methyladenosine-3'-phosphate
  modified_base 16: mod_base = OTHER; note = 2'-deoxy-2'-fluorouridine-3'-phosphate
  modified_base 17: mod_base = OTHER; note = 2'-O-methylguanosine-3'-phosphate
  modified_base 18: mod_base = OTHER; note = 2'-O-methylcytidine-3'-phosphate
  modified_base 19: mod_base = OTHER; note = 2'-O-methyladenosine-3'-phosphate
  modified_base 20: mod_base = OTHER; note = 2'-O-methyladenosine-3'-phosphate
  modified_base 21: mod_base = OTHER; note = 2'-O-methylguanosine-3'-phosphorothioate
  modified_base 22: mod_base = OTHER; note = 2'-O-methylguanosine-3'-phosphorothioate
  modified_base 23: mod_base = OTHER; note = 2'-O-methyluridine
  misc_feature 1..4: note = RNA
  misc_feature 6..23: note = RNA
  misc_feature 5: note = DNA
tgatgggaaaggttatgcaaggt

SEQ ID NO: 1313 - DNA, 23 bp, synthetic construct
  source 1..23: mol_type = other DNA
  modified_base 1: mod_base = OTHER; note = 2'-O-methyluridine-3'-phosphate 5'-(E)-Vinylphosphonate
  modified_base 2: mod_base = OTHER; note = 2'-deoxy-2'-fluorouridine-3'-phosphate
  modified_base 3: mod_base = OTHER; note = 2'-O-methylguanosine-3'-phosphate
  modified_base 4: mod_base = OTHER; note = 2'-O-methyladenosine-3'-phosphate
  modified_base 6: mod_base = OTHER; note = 2'-O-methylguanosine-3'-phosphate
  modified_base 7: mod_base = OTHER; note = guanosine-2'-phosphate
  modified_base 8: mod_base = OTHER; note = 2'-O-methylguanosine-3'-phosphate
  modified_base 9: mod_base = OTHER; note = 2'-O-methyladenosine-3'-phosphate
  modified_base 10: mod_base = OTHER; note = 2'-O-methyladenosine-3'-phosphate
  modified_base 11: mod_base = OTHER; note = 2'-O-methyladenosine-3'-phosphate
  modified_base 12: mod_base = OTHER; note = 2'-O-methylguanosine-3'-phosphate
  modified_base 13: mod_base = OTHER; note = 2'-O-methylguanosine-3'-phosphate
  modified_base 14: mod_base = OTHER; note = 2'-deoxy-2'-fluorouridine-3'-phosphate
  modified_base 15: mod_base = OTHER; note = 2'-O-methyluridine-3'-phosphate
  modified_base 16: mod_base = OTHER; note = 2'-deoxy-2'-fluoroadenosine-3'-phosphate
  modified_base 17: mod_base = OTHER; note = 2'-O-methyluridine-3'-phosphate
  modified_base 18: mod_base = OTHER; note = 2'-O-methylguanosine-3'-phosphate
  modified_base 19: mod_base = OTHER; note = 2'-O-methylcytidine-3'-phosphate
  modified_base 20: mod_base = OTHER; note = 2'-O-methyladenosine-3'-phosphate
  modified_base 21: mod_base = OTHER; note = 2'-O-methyladenosine-3'-phosphorothioate
  modified_base 22: mod_base = OTHER; note = 2'-O-methylguanosine-3'-phosphorothioate
  modified_base 23: mod_base = OTHER; note = 2'-O-methylguanosine
  misc_feature 1..4: note = RNA
  misc_feature 6..23: note = RNA
  misc_feature 5: note = DNA
ttgatgggaaaggttatgcaagg

SEQ ID NO: 1314 - DNA, 23 bp, synthetic construct
  source 1..23: mol_type = other DNA
  modified_base 1: mod_base = OTHER; note = 2'-O-methyluridine-3'-phosphate 5'-(E)-Vinylphosphonate
  modified_base 2: mod_base = OTHER; note = 2'-deoxy-2'-fluoroguanosine-3'-phosphate
  modified_base 3: mod_base = OTHER; note = 2'-O-methylcytidine-3'-phosphate
  modified_base 4: mod_base = OTHER; note = 2'-O-methylcytidine-3'-phosphate
  modified_base 6: mod_base = OTHER; note = 2'-O-methylcytidine-3'-phosphate
  modified_base 7: mod_base = OTHER; note = cytidine-2'-phosphate
  modified_base 8: mod_base = OTHER; note = 2'-O-methyladenosine-3'-phosphate
  modified_base 9: mod_base = OTHER; note = 2'-O-methylguanosine-3'-phosphate
  modified_base 10: mod_base = OTHER; note = 2'-O-methyladenosine-3'-phosphate
  modified_base 11: mod_base = OTHER; note = 2'-O-methylcytidine-3'-phosphate
  modified_base 12: mod_base = OTHER; note = 2'-O-methyluridine-3'-phosphate
  modified_base 13: mod_base = OTHER; note = 2'-O-methyluridine-3'-phosphate
  modified_base 14: mod_base = OTHER; note = 2'-deoxy-2'-fluoroadenosine-3'-phosphate
  modified_base 15: mod_base = OTHER; note = 2'-O-methyladenosine-3'-phosphate
  modified_base 16: mod_base = OTHER; note = 2'-deoxy-2'-fluoroadenosine-3'-phosphate
  modified_base 17: mod_base = OTHER; note = 2'-O-methylguanosine-3'-phosphate
  modified_base 18: mod_base = OTHER; note = 2'-O-methyladenosine-3'-phosphate
  modified_base 19: mod_base = OTHER; note = 2'-O-methyluridine-3'-phosphate
  modified_base 20: mod_base = OTHER; note = 2'-O-methylguanosine-3'-phosphate
  modified_base 21: mod_base = OTHER; note = 2'-O-methylguanosine-3'-phosphorothioate
  modified_base 22: mod_base = OTHER; note = 2'-O-methylcytidine-3'-phosphorothioate
  modified_base 23: mod_base = OTHER; note = 2'-O-methylcytidine
  misc_feature 1..4: note = RNA
  misc_feature 6..23: note = RNA
  misc_feature 5: note = DNA
tgcctccagacttaaagatggcc

SEQ ID NO: 1315 - DNA, 23 bp, synthetic construct
  source 1..23: mol_type = other DNA
  modified_base 1: mod_base = OTHER; note = 2'-O-methyluridine-3'-phosphate 5'-(E)-Vinylphosphonate
  modified_base 2: mod_base = OTHER; note = 2'-deoxy-2'-fluorouridine-3'-phosphate
  modified_base 3: mod_base = OTHER; note = 2'-O-methyluridine-3'-phosphate
  modified_base 4: mod_base = OTHER; note = 2'-O-methylguanosine-3'-phosphate
  modified_base 6: mod_base = OTHER; note = 2'-O-methylguanosine-3'-phosphate
  modified_base 7: mod_base = OTHER; note = guanosine-2'-phosphate
  modified_base 8: mod_base = OTHER; note = 2'-O-methyladenosine-3'-phosphate
  modified_base 9: mod_base = OTHER; note = 2'-O-methylguanosine-3'-phosphate
  modified_base 10: mod_base = OTHER; note = 2'-O-methyladenosine-3'-phosphate
  modified_base 11: mod_base = OTHER; note = 2'-O-methylguanosine-3'-phosphate
  modified_base 12: mod_base = OTHER; note = 2'-O-methyluridine-3'-phosphate
  modified_base 13: mod_base = OTHER; note = 2'-O-methyluridine-3'-phosphate
  modified_base 14: mod_base = OTHER; note = 2'-deoxy-2'-fluoroguanosine-3'-phosphate
  modified_base 15: mod_base = OTHER; note = 2'-O-methyluridine-3'-phosphate
  modified_base 16: mod_base = OTHER; note = 2'-deoxy-2'-fluoroadenosine-3'-phosphate
  modified_base 17: mod_base = OTHER; note = 2'-O-methyladenosine-3'-phosphate
  modified_base 18: mod_base = OTHER; note = 2'-O-methyluridine-3'-phosphate
  modified_base 19: mod_base = OTHER; note = 2'-O-methylguanosine-3'-phosphate
  modified_base 20: mod_base = OTHER; note = 2'-O-methylguanosine-3'-phosphate
  modified_base 21: mod_base = OTHER; note = 2'-O-methylcytidine-3'-phosphorothioate
  modified_base 22: mod_base = OTHER; note = 2'-O-methyladenosine-3'-phosphorothioate
  modified_base 23: mod_base = OTHER; note = 2'-O-methyluridine
  misc_feature 1..4: note = RNA
  misc_feature 6..23: note = RNA
  misc_feature 5: note = DNA
tttgtggagagttgtaatggcat

SEQ ID NO: 1316 - DNA, 23 bp, synthetic construct
  source 1..23: mol_type = other DNA
  modified_base 1: mod_base = OTHER; note = 2'-O-methyluridine-3'-phosphate 5'-(E)-Vinylphosphonate
  modified_base 2: mod_base = OTHER; note = 2'-deoxy-2'-fluoroguanosine-3'-phosphate
  modified_base 3: mod_base = OTHER; note = 2'-O-methyluridine-3'-phosphate
  modified_base 4: mod_base = OTHER; note = 2'-O-methyluridine-3'-phosphate
  modified_base 6: mod_base = OTHER; note = 2'-O-methyluridine-3'-phosphate
  modified_base 7: mod_base = OTHER; note = guanosine-2'-phosphate
  modified_base 8: mod_base = OTHER; note = 2'-O-methyluridine-3'-phosphate
  modified_base 9: mod_base = OTHER; note = 2'-O-methyluridine-3'-phosphate
  modified_base 10: mod_base = OTHER; note = 2'-O-methylguanosine-3'-phosphate
  modified_base 11: mod_base = OTHER; note = 2'-O-methyladenosine-3'-phosphate
  modified_base 12: mod_base = OTHER; note = 2'-O-methylguanosine-3'-phosphate
  modified_base 13: mod_base = OTHER; note = 2'-O-methylcytidine-3'-phosphate
  modified_base 14: mod_base = OTHER; note = 2'-deoxy-2'-fluoroadenosine-3'-phosphate
  modified_base 15: mod_base = OTHER; note = 2'-O-methyladenosine-3'-phosphate
  modified_base 16: mod_base = OTHER; note = 2'-deoxy-2'-fluoroguanosine-3'-phosphate
  modified_base 17: mod_base = OTHER; note = 2'-O-methylguanosine-3'-phosphate
  modified_base 18: mod_base = OTHER; note = 2'-O-methylcytidine-3'-phosphate
  modified_base 19: mod_base = OTHER; note = 2'-O-methyladenosine-3'-phosphate
  modified_base 20: mod_base = OTHER; note = 2'-O-methyladenosine-3'-phosphate
  modified_base 21: mod_base = OTHER; note = 2'-O-methylcytidine-3'-phosphorothioate
  modified_base 22: mod_base = OTHER; note = 2'-O-methylcytidine-3'-phosphorothioate
  modified_base 23: mod_base = OTHER; note = 2'-O-methyladenosine
  misc_feature 1..4: note = RNA
  misc_feature 6..23: note = RNA
  misc_feature 5: note = DNA
tgttttgttgagcaaggcaacca

SEQ ID NO: 1317 - DNA, 23 bp, synthetic construct
  source 1..23: mol_type = other DNA
  modified_base 1: mod_base = OTHER; note = 2'-O-methyluridine-3'-phosphate 5'-(E)-Vinylphosphonate
  modified_base 2: mod_base = OTHER; note = 2'-deoxy-2'-fluorocytidine-3'-phosphate
  modified_base 3: mod_base = OTHER; note = 2'-O-methyluridine-3'-phosphate
  modified_base 4: mod_base = OTHER; note = 2'-O-methylguanosine-3'-phosphate
  modified_base 6: mod_base = OTHER; note = 2'-O-methylcytidine-3'-phosphate
  modified_base 7: mod_base = OTHER; note = guanosine-2'-phosphate
  modified_base 8: mod_base = OTHER; note = 2'-O-methyluridine-3'-phosphate
  modified_base 9: mod_base = OTHER; note = 2'-O-methyladenosine-3'-phosphate
  modified_base 10: mod_base = OTHER; note = 2'-O-methyladenosine-3'-phosphate
  modified_base 11: mod_base = OTHER; note = 2'-O-methyluridine-3'-phosphate
  modified_base 12: mod_base = OTHER; note = 2'-O-methyladenosine-3'-phosphate
  modified_base 13: mod_base = OTHER; note = 2'-O-methylguanosine-3'-phosphate
  modified_base 14: mod_base = OTHER; note = 2'-deoxy-2'-fluorocytidine-3'-phosphate
  modified_base 15: mod_base = OTHER; note = 2'-O-methylcytidine-3'-phosphate
  modified_base 16: mod_base = OTHER; note = 2'-deoxy-2'-fluoroadenosine-3'-phosphate
  modified_base 17: mod_base = OTHER; note = 2'-O-methyladenosine-3'-phosphate
  modified_base 18: mod_base = OTHER; note = 2'-O-methylguanosine-3'-phosphate
  modified_base 19: mod_base = OTHER; note = 2'-O-methyladenosine-3'-phosphate
  modified_base 20: mod_base = OTHER; note = 2'-O-methyladenosine-3'-phosphate
  modified_base 21: mod_base = OTHER; note = 2'-O-methyluridine-3'-phosphorothioate
  modified_base 22: mod_base = OTHER; note = 2'-O-methyluridine-3'-phosphorothioate
  modified_base 23: mod_base = OTHER; note = 2'-O-methyluridine
  misc_feature 1..4: note = RNA
  misc_feature 6..23: note = RNA
  misc_feature 5: note = DNA
tctgtcgtaatagccaagaattt

SEQ ID NO: 1318 - DNA, 23 bp, synthetic construct
  source 1..23: mol_type = other DNA
  modified_base 1: mod_base = OTHER; note = 2'-O-methyluridine-3'-phosphate 5'-(E)-Vinylphosphonate
  modified_base 2: mod_base = OTHER; note = 2'-deoxy-2'-fluorouridine-3'-phosphate
  modified_base 3: mod_base = OTHER; note = 2'-O-methyladenosine-3'-phosphate
  modified_base 4: mod_base = OTHER; note = 2'-O-methyluridine-3'-phosphate
  modified_base 6: mod_base = OTHER; note = 2'-O-methylguanosine-3'-phosphate
  modified_base 7: mod_base = OTHER; note = guanosine-2'-phosphate
  modified_base 8: mod_base = OTHER; note = 2'-O-methyluridine-3'-phosphate
  modified_base 9: mod_base = OTHER; note = 2'-O-methylcytidine-3'-phosphate
  modified_base 10: mod_base = OTHER; note = 2'-O-methylcytidine-3'-phosphate
  modified_base 11: mod_base = OTHER; note = 2'-O-methyluridine-3'-phosphate
  modified_base 12: mod_base = OTHER; note = 2'-O-methylcytidine-3'-phosphate
  modified_base 13: mod_base = OTHER; note = 2'-O-methyladenosine-3'-phosphate
  modified_base 14: mod_base = OTHER; note = 2'-deoxy-2'-fluorouridine-3'-phosphate
  modified_base 15: mod_base = OTHER; note = 2'-O-methyluridine-3'-phosphate
  modified_base 16: mod_base = OTHER; note = 2'-deoxy-2'-fluoroadenosine-3'-phosphate
  modified_base 17: mod_base = OTHER; note = 2'-O-methyluridine-3'-phosphate
  modified_base 18: mod_base = OTHER; note = 2'-O-methyladenosine-3'-phosphate
  modified_base 19: mod_base = OTHER; note = 2'-O-methyluridine-3'-phosphate
  modified_base 20: mod_base = OTHER; note = 2'-O-methyluridine-3'-phosphate
  modified_base 21: mod_base = OTHER; note = 2'-O-methyluridine-3'-phosphorothioate
  modified_base 22: mod_base = OTHER; note = 2'-O-methyladenosine-3'-phosphorothioate
  modified_base 23: mod_base = OTHER; note = 2'-O-methylcytidine
  misc_feature 1..4: note = RNA
  misc_feature 6..23: note = RNA
  misc_feature 5: note = DNA
ttataggtcctcattatatttac

SEQ ID NO: 1319 - DNA, 23 bp, synthetic construct
  source 1..23: mol_type = other DNA
  modified_base 1: mod_base = OTHER; note = 2'-O-methyluridine-3'-phosphate 5'-(E)-Vinylphosphonate
  modified_base 2: mod_base = OTHER; note = 2'-deoxy-2'-fluoroguanosine-3'-phosphate
  modified_base 3: mod_base = OTHER; note = 2'-O-methyluridine-3'-phosphate
  modified_base 4: mod_base = OTHER; note = 2'-O-methyladenosine-3'-phosphate
  modified_base 6: mod_base = OTHER; note = 2'-O-methyladenosine-3'-phosphate
  modified_base 7: mod_base = OTHER; note = guanosine-2'-phosphate
  modified_base 8: mod_base = OTHER; note = 2'-O-methylguanosine-3'-phosphate
  modified_base 9: mod_base = OTHER; note = 2'-O-methyluridine-3'-phosphate
  modified_base 10: mod_base = OTHER; note = 2'-O-methylcytidine-3'-phosphate
  modified_base 11: mod_base = OTHER; note = 2'-O-methylcytidine-3'-phosphate
  modified_base 12: mod_base = OTHER; note = 2'-O-methyluridine-3'-phosphate
  modified_base 13: mod_base = OTHER; note = 2'-O-methylcytidine-3'-phosphate
  modified_base 14: mod_base = OTHER; note = 2'-deoxy-2'-fluoroadenosine-3'-phosphate
  modified_base 15: mod_base = OTHER; note = 2'-O-methyluridine-3'-phosphate
  modified_base 16: mod_base = OTHER; note = 2'-deoxy-2'-fluorouridine-3'-phosphate
  modified_base 17: mod_base = OTHER; note = 2'-O-methyladenosine-3'-phosphate
  modified_base 18: mod_base = OTHER; note = 2'-O-methyluridine-3'-phosphate
  modified_base 19: mod_base = OTHER; note = 2'-O-methyladenosine-3'-phosphate
  modified_base 20: mod_base = OTHER; note = 2'-O-methyluridine-3'-phosphate
  modified_base 21: mod_base = OTHER; note = 2'-O-methyluridine-3'-phosphorothioate
  modified_base 22: mod_base = OTHER; note = 2'-O-methyluridine-3'-phosphorothioate
  modified_base 23: mod_base = OTHER; note = 2'-O-methyladenosine
  misc_feature 1..4: note = RNA
  misc_feature 6..23: note = RNA
  misc_feature 5: note = DNA
tgtataggtcctcattatattta

SEQ ID NO: 1320 - DNA, 23 bp, synthetic construct
  source 1..23: mol_type = other DNA
  modified_base 1: mod_base = OTHER; note = 2'-O-methyluridine-3'-phosphate 5'-(E)-Vinylphosphonate
  modified_base 2: mod_base = OTHER; note = 2'-deoxy-2'-fluorouridine-3'-phosphate
  modified_base 3: mod_base = OTHER; note = 2'-O-methyladenosine-3'-phosphate
  modified_base 4: mod_base = OTHER; note = 2'-O-methylguanosine-3'-phosphate
  modified_base 6: mod_base = OTHER; note = 2'-O-methyladenosine-3'-phosphate
  modified_base 7: mod_base = OTHER; note = cytidine-2'-phosphate
  modified_base 8: mod_base = OTHER; note = 2'-O-methylcytidine-3'-phosphate
  modified_base 9: mod_base = OTHER; note = 2'-O-methyluridine-3'-phosphate
  modified_base 10: mod_base = OTHER; note = 2'-O-methyluridine-3'-phosphate
  modified_base 11: mod_base = OTHER; note = 2'-O-methylcytidine-3'-phosphate
  modified_base 12: mod_base = OTHER; note = 2'-O-methyladenosine-3'-phosphate
  modified_base 13: mod_base = OTHER; note = 2'-O-methylguanosine-3'-phosphate
  modified_base 14: mod_base = OTHER; note = 2'-deoxy-2'-fluorocytidine-3'-phosphate
  modified_base 15: mod_base = OTHER; note = 2'-O-methyladenosine-3'-phosphate
  modified_base 16: mod_base = OTHER; note = 2'-deoxy-2'-fluorocytidine-3'-phosphate
  modified_base 17: mod_base = OTHER; note = 2'-O-methyluridine-3'-phosphate
  modified_base 18: mod_base = OTHER; note = 2'-O-methylcytidine-3'-phosphate
  modified_base 19: mod_base = OTHER; note = 2'-O-methyluridine-3'-phosphate
  modified_base 20: mod_base = OTHER; note = 2'-O-methylguanosine-3'-phosphate
  modified_base 21: mod_base = OTHER; note = 2'-O-methylcytidine-3'-phosphorothioate
  modified_base 22: mod_base = OTHER; note = 2'-O-methyluridine-3'-phosphorothioate
  modified_base 23: mod_base = OTHER; note = 2'-O-methyluridine
  misc_feature 1..4: note = RNA
  misc_feature 6..23: note = RNA
  misc_feature 5: note = DNA
ttagcaccttcagcactctgctt

SEQ ID NO: 1321 - DNA, 23 bp, synthetic construct
  source 1..23: mol_type = other DNA
  modified_base 1: mod_base = OTHER; note = 2'-O-methyluridine-3'-phosphate 5'-(E)-Vinylphosphonate
  modified_base 2: mod_base = OTHER; note = 2'-deoxy-2'-fluorouridine-3'-phosphate
  modified_base 3: mod_base = OTHER; note = 2'-O-methyladenosine-3'-phosphate
  modified_base 4: mod_base = OTHER; note = 2'-O-methyluridine-3'-phosphate
  modified_base 6: mod_base = OTHER; note = 2'-O-methyluridine-3'-phosphate
  modified_base 7: mod_base = OTHER; note = cytidine-2'-phosphate
  modified_base 8: mod_base = OTHER; note = 2'-O-methyladenosine-3'-phosphate
  modified_base 9: mod_base = OTHER; note = 2'-O-methyluridine-3'-phosphate
  modified_base 10: mod_base = OTHER; note = 2'-O-methylcytidine-3'-phosphate
  modified_base 11: mod_base = OTHER; note = 2'-O-methyluridine-3'-phosphate
  modified_base 12: mod_base = OTHER; note = 2'-O-methylguanosine-3'-phosphate
  modified_base 13: mod_base = OTHER; note = 2'-O-methyladenosine-3'-phosphate
  modified_base 14: mod_base = OTHER; note = 2'-deoxy-2'-fluoroadenosine-3'-phosphate
  modified_base 15: mod_base = OTHER; note = 2'-O-methylcytidine-3'-phosphate
  modified_base 16: mod_base = OTHER; note = 2'-deoxy-2'-fluorocytidine-3'-phosphate
  modified_base 17: mod_base = OTHER; note = 2'-O-methylcytidine-3'-phosphate
  modified_base 18: mod_base = OTHER; note = 2'-O-methyladenosine-3'-phosphate
  modified_base 19: mod_base = OTHER; note = 2'-O-methylguanosine-3'-phosphate
  modified_base 20: mod_base = OTHER; note = 2'-O-methyladenosine-3'-phosphate
  modified_base 21: mod_base = OTHER; note = 2'-O-methyladenosine-3'-phosphorothioate
  modified_base 22: mod_base = OTHER; note = 2'-O-methylguanosine-3'-phosphorothioate
  modified_base 23: mod_base = OTHER; note = 2'-O-methylcytidine
  misc_feature 1..4: note = RNA
  misc_feature 6..23: note = RNA
  misc_feature 5: note = DNA
ttatatcatctgaacccagaagc

SEQ ID NO: 1322 - DNA, 23 bp, synthetic construct
  source 1..23: mol_type = other DNA
  modified_base 1: mod_base = OTHER; note = 2'-O-methyluridine-3'-phosphate 5'-(E)-Vinylphosphonate
  modified_base 2: mod_base = OTHER; note = 2'-deoxy-2'-fluoroguanosine-3'-phosphate
  modified_base 3: mod_base = OTHER; note = 2'-O-methyluridine-3'-phosphate
  modified_base 4: mod_base = OTHER; note = 2'-O-methylguanosine-3'-phosphate
  modified_base 6: mod_base = OTHER; note = 2'-O-methylcytidine-3'-phosphate
  modified_base 7: mod_base = OTHER; note = cytidine-2'-phosphate
  modified_base 8: mod_base = OTHER; note = 2'-O-methyladenosine-3'-phosphate
  modified_base 9: mod_base = OTHER; note = 2'-O-methylcytidine-3'-phosphate
  modified_base 10: mod_base = OTHER; note = 2'-O-methyladenosine-3'-phosphate
  modified_base 11: mod_base = OTHER; note = 2'-O-methyluridine-3'-phosphate
  modified_base 12: mod_base = OTHER; note = 2'-O-methyluridine-3'-phosphate
  modified_base 13: mod_base = OTHER; note = 2'-O-methyluridine-3'-phosphate
  modified_base 14: mod_base = OTHER; note = 2'-deoxy-2'-fluoroadenosine-3'-phosphate
  modified_base 15: mod_base = OTHER; note = 2'-O-methyluridine-3'-phosphate
  modified_base 16: mod_base = OTHER; note = 2'-deoxy-2'-fluoroadenosine-3'-phosphate
  modified_base 17: mod_base = OTHER; note = 2'-O-methyluridine-3'-phosphate
  modified_base 18: mod_base = OTHER; note = 2'-O-methylcytidine-3'-phosphate
  modified_base 19: mod_base = OTHER; note = 2'-O-methyladenosine-3'-phosphate
  modified_base 20: mod_base = OTHER; note = 2'-O-methyluridine-3'-phosphate
  modified_base 21: mod_base = OTHER; note = 2'-O-methylcytidine-3'-phosphorothioate
  modified_base 22: mod_base = OTHER; note = 2'-O-methyluridine-3'-phosphorothioate
  modified_base 23: mod_base = OTHER; note = 2'-O-methylguanosine
  misc_feature 1..4: note = RNA
  misc_feature 6..23: note = RNA
  misc_feature 5: note = DNA
tgtgaccacatttatatcatctg

SEQ ID NO: 1323 - DNA, 23 bp, synthetic construct
  source 1..23: mol_type = other DNA
  modified_base 1: mod_base = OTHER; note = 2'-O-methyluridine-3'-phosphate 5'-(E)-Vinylphosphonate
  modified_base 2: mod_base = OTHER; note = 2'-deoxy-2'-fluoroguanosine-3'-phosphate
  modified_base 3: mod_base = OTHER; note = 2'-O-methyluridine-3'-phosphate
  modified_base 4: mod_base = OTHER; note = 2'-O-methylguanosine-3'-phosphate
  modified_base 6: mod_base = OTHER; note = 2'-O-methylguanosine-3'-phosphate
  modified_base 7: mod_base = OTHER; note = guanosine-2'-phosphate
  modified_base 8: mod_base = OTHER; note = 2'-O-methyluridine-3'-phosphate
  modified_base 9: mod_base = OTHER; note = 2'-O-methyluridine-3'-phosphate
  modified_base 10: mod_base = OTHER; note = 2'-O-methyladenosine-3'-phosphate
  modified_base 11: mod_base = OTHER; note = 2'-O-methylguanosine-3'-phosphate
  modified_base 12: mod_base = OTHER; note = 2'-O-methyladenosine-3'-phosphate
  modified_base 13: mod_base = OTHER; note = 2'-O-methyladenosine-3'-phosphate
  modified_base 14: mod_base = OTHER; note = 2'-deoxy-2'-fluoroadenosine-3'-phosphate
  modified_base 15: mod_base = OTHER; note = 2'-O-methylguanosine-3'-phosphate
  modified_base 16: mod_base = OTHER; note = 2'-deoxy-2'-fluoroadenosine-3'-phosphate
  modified_base 17: mod_base = OTHER; note = 2'-O-methyladenosine-3'-phosphate
  modified_base 18: mod_base = OTHER; note = 2'-O-methyluridine-3'-phosphate
  modified_base 19: mod_base = OTHER; note = 2'-O-methyluridine-3'-phosphate
  modified_base 20: mod_base = OTHER; note = 2'-O-methylcytidine-3'-phosphate
  modified_base 21: mod_base = OTHER; note = 2'-O-methylcytidine-3'-phosphorothioate
  modified_base 22: mod_base = OTHER; note = 2'-O-methyladenosine-3'-phosphorothioate
  modified_base 23: mod_base = OTHER; note = 2'-O-methylguanosine
  misc_feature 1..4: note = RNA
  misc_feature 6..23: note = RNA
  misc_feature 5: note = DNA
tgtgaggttagaaagaattccag

SEQ ID NO: 1324 - DNA, 23 bp, synthetic construct
  source 1..23: mol_type = other DNA
  modified_base 1: mod_base = OTHER; note = 2'-O-methyluridine-3'-phosphate 5'-(E)-Vinylphosphonate
  modified_base 2: mod_base = OTHER; note = 2'-deoxy-2'-fluorouridine-3'-phosphate
  modified_base 3: mod_base = OTHER; note = 2'-O-methylguanosine-3'-phosphate
  modified_base 4: mod_base = OTHER; note = 2'-O-methylcytidine-3'-phosphate
  modified_base 6: mod_base = OTHER; note = 2'-O-methyladenosine-3'-phosphate
  modified_base 7: mod_base = OTHER; note = guanosine-2'-phosphate
  modified_base 8: mod_base = OTHER; note = 2'-O-methyluridine-3'-phosphate
  modified_base 9: mod_base = OTHER; note = 2'-O-methylguanosine-3'-phosphate
  modified_base 10: mod_base = OTHER; note = 2'-O-methyladenosine-3'-phosphate
  modified_base 11: mod_base = OTHER; note = 2'-O-methylguanosine-3'-phosphate
  modified_base 12: mod_base = OTHER; note = 2'-O-methylguanosine-3'-phosphate
  modified_base 13: mod_base = OTHER; note = 2'-O-methyluridine-3'-phosphate
  modified_base 14: mod_base = OTHER; note = 2'-deoxy-2'-fluorouridine-3'-phosphate
  modified_base 15: mod_base = OTHER; note = 2'-O-methyladenosine-3'-phosphate
  modified_base 16: mod_base = OTHER; note = 2'-deoxy-2'-fluoroguanosine-3'-phosphate
  modified_base 17: mod_base = OTHER; note = 2'-O-methyladenosine-3'-phosphate
  modified_base 18: mod_base = OTHER; note = 2'-O-methyladenosine-3'-phosphate
  modified_base 19: mod_base = OTHER; note = 2'-O-methyladenosine-3'-phosphate
  modified_base 20: mod_base = OTHER; note = 2'-O-methylguanosine-3'-phosphate
  modified_base 21: mod_base = OTHER; note = 2'-O-methyladenosine-3'-phosphorothioate
  modified_base 22: mod_base = OTHER; note = 2'-O-methyladenosine-3'-phosphorothioate
  modified_base 23: mod_base = OTHER; note = 2'-O-methyluridine
  misc_feature 1..4: note = RNA
  misc_feature 6..23: note = RNA
  misc_feature 5: note = DNA
ttgcaagtgaggttagaaagaat

SEQ ID NO: 1325 - DNA, 23 bp, synthetic construct
  source 1..23: mol_type = other DNA
  modified_base 1: mod_base = OTHER; note = 2'-O-methyluridine-3'-phosphate 5'-(E)-Vinylphosphonate
  modified_base 2: mod_base = OTHER; note = 2'-deoxy-2'-fluorouridine-3'-phosphate
  modified_base 3: mod_base = OTHER; note = 2'-O-methyladenosine-3'-phosphate
  modified_base 4: mod_base = OTHER; note = 2'-O-methyluridine-3'-phosphate
  modified_base 6: mod_base = OTHER; note = 2'-O-methylguanosine-3'-phosphate
  modified_base 7: mod_base = OTHER; note = cytidine-2'-phosphate
  modified_base 8: mod_base = OTHER; note = 2'-O-methyladenosine-3'-phosphate
  modified_base 9: mod_base = OTHER; note = 2'-O-methyladenosine-3'-phosphate
  modified_base 10: mod_base = OTHER; note = 2'-O-methylguanosine-3'-phosphate
  modified_base 11: mod_base = OTHER; note = 2'-O-methyluridine-3'-phosphate
  modified_base 12: mod_base = OTHER; note = 2'-O-methylguanosine-3'-phosphate
  modified_base 13: mod_base = OTHER; note = 2'-O-methyladenosine-3'-phosphate
  modified_base 14: mod_base = OTHER; note = 2'-deoxy-2'-fluoroguanosine-3'-phosphate
  modified_base 15: mod_base = OTHER; note = 2'-O-methylguanosine-3'-phosphate
  modified_base 16: mod_base = OTHER; note = 2'-deoxy-2'-fluorouridine-3'-phosphate
  modified_base 17: mod_base = OTHER; note = 2'-O-methyluridine-3'-phosphate
  modified_base 18: mod_base = OTHER; note = 2'-O-methyladenosine-3'-phosphate
  modified_base 19: mod_base = OTHER; note = 2'-O-methylguanosine-3'-phosphate
  modified_base 20: mod_base = OTHER; note = 2'-O-methyladenosine-3'-phosphate
  modified_base 21: mod_base = OTHER; note = 2'-O-methyladenosine-3'-phosphorothioate
  modified_base 22: mod_base = OTHER; note = 2'-O-methyladenosine-3'-phosphorothioate
  modified_base 23: mod_base = OTHER; note = 2'-O-methylguanosine
  misc_feature 1..4: note = RNA
  misc_feature 6..23: note = RNA
  misc_feature 5: note = DNA
ttattgcaagtgaggttagaaag

SEQ ID NO: 1326 - DNA, 23 bp, synthetic construct
  source 1..23: mol_type = other DNA
  modified_base 1: mod_base = OTHER; note = 2'-O-methyluridine-3'-phosphate 5'-(E)-Vinylphosphonate
  modified_base 2: mod_base = OTHER; note = 2'-deoxy-2'-fluorouridine-3'-phosphate
  modified_base 3: mod_base = OTHER; note = 2'-O-methyluridine-3'-phosphate
  modified_base 4: mod_base = OTHER; note = 2'-O-methyladenosine-3'-phosphate
  modified_base 6: mod_base = OTHER; note = 2'-O-methyluridine-3'-phosphate
  modified_base 7: mod_base = OTHER; note = guanosine-2'-phosphate
  modified_base 8: mod_base = OTHER; note = 2'-O-methylcytidine-3'-phosphate
  modified_base 9: mod_base = OTHER; note = 2'-O-methyladenosine-3'-phosphate
  modified_base 10: mod_base = OTHER; note = 2'-O-methyladenosine-3'-phosphate
  modified_base 11: mod_base = OTHER; note = 2'-O-methylguanosine-3'-phosphate
  modified_base 12: mod_base = OTHER; note = 2'-O-methyluridine-3'-phosphate
  modified_base 13: mod_base = OTHER; note = 2'-O-methylguanosine-3'-phosphate
  modified_base 14: mod_base = OTHER; note = 2'-deoxy-2'-fluoroadenosine-3'-phosphate
  modified_base 15: mod_base = OTHER; note = 2'-O-methylguanosine-3'-phosphate
  modified_base 16: mod_base = OTHER; note = 2'-deoxy-2'-fluoroguanosine-3'-phosphate
  modified_base 17: mod_base = OTHER; note = 2'-O-methyluridine-3'-phosphate
  modified_base 18: mod_base = OTHER; note = 2'-O-methyluridine-3'-phosphate
  modified_base 19: mod_base = OTHER; note = 2'-O-methyladenosine-3'-phosphate
  modified_base 20: mod_base = OTHER; note = 2'-O-methylguanosine-3'-phosphate
  modified_base 21: mod_base = OTHER; note = 2'-O-methyladenosine-3'-phosphorothioate
  modified_base 22: mod_base = OTHER; note = 2'-O-methyladenosine-3'-phosphorothioate
  modified_base 23: mod_base = OTHER; note = 2'-O-methyladenosine
  misc_feature 1..4: note = RNA
  misc_feature 6..23: note = RNA
  misc_feature 5: note = DNA
tttattgcaagtgaggttagaaa

SEQ ID NO: 1327 - DNA, 23 bp, synthetic construct
  source 1..23: mol_type = other DNA
  modified_base 1: mod_base = OTHER; note = 2'-O-methyluridine-3'-phosphate 5'-(E)-Vinylphosphonate
  modified_base 2: mod_base = OTHER; note = 2'-deoxy-2'-fluoroadenosine-3'-phosphate
  modified_base 3: mod_base = OTHER; note = 2'-O-methylguanosine-3'-phosphate
  modified_base 4: mod_base = OTHER; note = 2'-O-methylcytidine-3'-phosphate
  modified_base 6: mod_base = OTHER; note = 2'-O-methyluridine-3'-phosphate
  modified_base 7: mod_base = OTHER; note = cytidine-2'-phosphate
  modified_base 8: mod_base = OTHER; note = 2'-O-methyluridine-3'-phosphate
  modified_base 9: mod_base = OTHER; note = 2'-O-methyladenosine-3'-phosphate
  modified_base 10: mod_base = OTHER; note = 2'-O-methyluridine-3'-phosphate
  modified_base 11: mod_base = OTHER; note = 2'-O-methyladenosine-3'-phosphate
  modified_base 12: mod_base = OTHER; note = 2'-O-methylcytidine-3'-phosphate
  modified_base 13: mod_base = OTHER; note = 2'-O-methylcytidine-3'-phosphate
  modified_base 14: mod_base = OTHER; note = 2'-deoxy-2'-fluoroadenosine-3'-phosphate
  modified_base 15: mod_base = OTHER; note = 2'-O-methylcytidine-3'-phosphate
  modified_base 16: mod_base = OTHER; note = 2'-deoxy-2'-fluorocytidine-3'-phosphate
  modified_base 17: mod_base = OTHER; note = 2'-O-methylcytidine-3'-phosphate
  modified_base 18: mod_base = OTHER; note = 2'-O-methyladenosine-3'-phosphate
  modified_base 19: mod_base = OTHER; note = 2'-O-methylcytidine-3'-phosphate
  modified_base 20: mod_base = OTHER; note = 2'-O-methyluridine-3'-phosphate
  modified_base 21: mod_base = OTHER; note = 2'-O-methyluridine-3'-phosphorothioate
  modified_base 22: mod_base = OTHER; note = 2'-O-methylguanosine-3'-phosphorothioate
  modified_base 23: mod_base = OTHER; note = 2'-O-methylguanosine
  misc_feature 1..4: note = RNA
  misc_feature 6..23: note = RNA
  misc_feature 5: note = DNA
tagcctctataccacccacttgg

SEQ ID NO: 1328 - DNA, 23 bp, synthetic construct
  source 1..23: mol_type = other DNA
  modified_base 1: mod_base = OTHER; note = 2'-O-methyluridine-3'-phosphate 5'-(E)-Vinylphosphonate
  modified_base 2: mod_base = OTHER; note = 2'-deoxy-2'-fluoroadenosine-3'-phosphate
  modified_base 3: mod_base = OTHER; note = 2'-O-methyladenosine-3'-phosphate
  modified_base 4: mod_base = OTHER; note = 2'-O-methylguanosine-3'-phosphate
  modified_base 6: mod_base = OTHER; note = 2'-O-methylguanosine-3'-phosphate
  modified_base 7: mod_base = OTHER; note = cytidine-2'-phosphate
  modified_base 8: mod_base = OTHER; note = 2'-O-methylcytidine-3'-phosphate
  modified_base 9: mod_base = OTHER; note = 2'-O-methyluridine-3'-phosphate
  modified_base 10: mod_base = OTHER; note = 2'-O-methylcytidine-3'-phosphate
  modified_base 11: mod_base = OTHER; note = 2'-O-methyluridine-3'-phosphate
  modified_base 12: mod_base = OTHER; note = 2'-O-methyladenosine-3'-phosphate
  modified_base 13: mod_base = OTHER; note = 2'-O-methyluridine-3'-phosphate
  modified_base 14: mod_base = OTHER; note = 2'-deoxy-2'-fluoroadenosine-3'-phosphate
  modified_base 15: mod_base = OTHER; note = 2'-O-methylcytidine-3'-phosphate
  modified_base 16: mod_base = OTHER; note = 2'-deoxy-2'-fluorocytidine-3'-phosphate
  modified_base 17: mod_base = OTHER; note = 2'-O-methyladenosine-3'-phosphate
  modified_base 18: mod_base = OTHER; note = 2'-O-methylcytidine-3'-phosphate
  modified_base 19: mod_base = OTHER; note = 2'-O-methylcytidine-3'-phosphate
  modified_base 20: mod_base = OTHER; note = 2'-O-methylcytidine-3'-phosphate
  modified_base 21: mod_base = OTHER; note = 2'-O-methyladenosine-3'-phosphorothioate
  modified_base 22: mod_base = OTHER; note = 2'-O-methylcytidine-3'-phosphorothioate
  modified_base 23: mod_base = OTHER; note = 2'-O-methyluridine
  misc_feature 1..4: note = RNA
  misc_feature 6..23: note = RNA
  misc_feature 5: note = DNA
taagagcctctataccacccact

SEQ ID NO: 1329 - DNA, 23 bp, synthetic construct
  source 1..23: mol_type = other DNA
  modified_base 1: mod_base = OTHER; note = 2'-O-methyluridine-3'-phosphate 5'-(E)-Vinylphosphonate
  modified_base 2: mod_base = OTHER; note = 2'-deoxy-2'-fluoroadenosine-3'-phosphate
  modified_base 3: mod_base = OTHER; note = 2'-O-methyladenosine-3'-phosphate
  modified_base 4: mod_base = OTHER; note = 2'-O-methylguanosine-3'-phosphate
  modified_base 6: mod_base = OTHER; note = 2'-O-methylguanosine-3'-phosphate
  modified_base 7: mod_base = OTHER; note = cytidine-2'-phosphate
  modified_base 8: mod_base = OTHER; note = 2'-O-methyladenosine-3'-phosphate
  modified_base 9: mod_base = OTHER; note = 2'-O-methylcytidine-3'-phosphate
  modified_base 10: mod_base = OTHER; note = 2'-O-methyladenosine-3'-phosphate
  modified_base 11: mod_base = OTHER; note = 2'-O-methylguanosine-3'-phosphate
  modified_base 12: mod_base = OTHER; note = 2'-O-methyladenosine-3'-phosphate
  modified_base 13: mod_base = OTHER; note = 2'-O-methyluridine-3'-phosphate
  modified_base 14: mod_base = OTHER; note = 2'-deoxy-2'-fluoroguanosine-3'-phosphate
  modified_base 15: mod_base = OTHER; note = 2'-O-methylguanosine-3'-phosphate
  modified_base 16: mod_base = OTHER; note = 2'-deoxy-2'-fluorocytidine-3'-phosphate
  modified_base 17: mod_base = OTHER; note = 2'-O-methyladenosine-3'-phosphate
  modified_base 18: mod_base = OTHER; note = 2'-O-methylguanosine-3'-phosphate
  modified_base 19: mod_base = OTHER; note = 2'-O-methylguanosine-3'-phosphate
  modified_base 20: mod_base = OTHER; note = 2'-O-methylcytidine-3'-phosphate
  modified_base 21: mod_base = OTHER; note = 2'-O-methyluridine-3'-phosphorothioate
  modified_base 22: mod_base = OTHER; note = 2'-O-methylcytidine-3'-phosphorothioate
  modified_base 23: mod_base = OTHER; note = 2'-O-methyladenosine
  misc_feature 1..4: note = RNA
  misc_feature 6..23: note = RNA
  misc_feature 5: note = DNA
taagagcacagatggcaggctca

SEQ ID NO: 1330 - DNA, 23 bp, synthetic construct
  source 1..23: mol_type = other DNA
  modified_base 1: mod_base = OTHER; note = 2'-O-methyluridine-3'-phosphate 5'-(E)-Vinylphosphonate
  modified_base 2: mod_base = OTHER; note = 2'-deoxy-2'-fluoroguanosine-3'-phosphate
  modified_base 3: mod_base = OTHER; note = 2'-O-methyladenosine-3'-phosphate
  modified_base 4: mod_base = OTHER; note = 2'-O-methyladenosine-3'-phosphate
  modified_base 6: mod_base = OTHER; note = 2'-O-methyladenosine-3'-phosphate
  modified_base 7: mod_base = OTHER; note = guanosine-2'-phosphate
  modified_base 8: mod_base = OTHER; note = 2'-O-methylcytidine-3'-phosphate
  modified_base 9: mod_base = OTHER; note = 2'-O-methyladenosine-3'-phosphate
  modified_base 10: mod_base = OTHER; note = 2'-O-methylcytidine-3'-phosphate
  modified_base 11: mod_base = OTHER; note = 2'-O-methyladenosine-3'-phosphate
  modified_base 12: mod_base = OTHER; note = 2'-O-methylguanosine-3'-phosphate
  modified_base 13: mod_base = OTHER; note = 2'-O-methyladenosine-3'-phosphate
  modified_base 14: mod_base = OTHER; note = 2'-deoxy-2'-fluorouridine-3'-phosphate
  modified_base 15: mod_base = OTHER; note = 2'-O-methylguanosine-3'-phosphate
  modified_base 16: mod_base = OTHER; note = 2'-deoxy-2'-fluoroguanosine-3'-phosphate
  modified_base 17: mod_base = OTHER; note = 2'-O-methylcytidine-3'-phosphate
  modified_base 18: mod_base = OTHER; note = 2'-O-methyladenosine-3'-phosphate
  modified_base 19: mod_base = OTHER; note = 2'-O-methylguanosine-3'-phosphate
  modified_base 20: mod_base = OTHER; note = 2'-O-methylguanosine-3'-phosphate
  modified_base 21: mod_base = OTHER; note = 2'-O-methylcytidine-3'-phosphorothioate
  modified_base 22: mod_base = OTHER; note = 2'-O-methyluridine-3'-phosphorothioate
  modified_base 23: mod_base = OTHER; note = 2'-O-methylcytidine
  misc_feature 1..4: note = RNA
  misc_feature 6..23: note = RNA
  misc_feature 5: note = DNA
tgaagagcacagatggcaggctc

SEQ ID NO: 1331 - DNA, 23 bp, synthetic construct
  source 1..23: mol_type = other DNA
  modified_base 1: mod_base = OTHER; note = 2'-O-methyluridine-3'-phosphate 5'-(E)-Vinylphosphonate
  modified_base 2: mod_base = OTHER; note = 2'-deoxy-2'-fluoroguanosine-3'-phosphate
  modified_base 3: mod_base = OTHER; note = 2'-O-methyladenosine-3'-phosphate
  modified_base 4: mod_base = OTHER; note = 2'-O-methyluridine-3'-phosphate
  modified_base 6: mod_base = OTHER; note = 2'-O-methyladenosine-3'-phosphate
  modified_base 7: mod_base = OTHER; note = cytidine-2'-phosphate
  modified_base 8: mod_base = OTHER; note = 2'-O-methylguanosine-3'-phosphate
  modified_base 9: mod_base = OTHER; note = 2'-O-methyladenosine-3'-phosphate
  modified_base 10: mod_base = OTHER; note = 2'-O-methyladenosine-3'-phosphate
  modified_base 11: mod_base = OTHER; note = 2'-O-methylguanosine-3'-phosphate
  modified_base 12: mod_base = OTHER; note = 2'-O-methyladenosine-3'-phosphate
  modified_base 13: mod_base = OTHER; note = 2'-O-methylguanosine-3'-phosphate
  modified_base 14: mod_base = OTHER; note = 2'-deoxy-2'-fluorocytidine-3'-phosphate
  modified_base 15: mod_base = OTHER; note = 2'-O-methyladenosine-3'-phosphate
  modified_base 16: mod_base = OTHER; note = 2'-deoxy-2'-fluorocytidine-3'-phosphate
  modified_base 17: mod_base = OTHER; note = 2'-O-methyladenosine-3'-phosphate
  modified_base 18: mod_base = OTHER; note = 2'-O-methylguanosine-3'-phosphate
  modified_base 19: mod_base = OTHER; note = 2'-O-methyladenosine-3'-phosphate
  modified_base 20: mod_base = OTHER; note = 2'-O-methyluridine-3'-phosphate
  modified_base 21: mod_base = OTHER; note = 2'-O-methylguanosine-3'-phosphorothioate
  modified_base 22: mod_base = OTHER; note = 2'-O-methylguanosine-3'-phosphorothioate
  modified_base 23: mod_base = OTHER; note = 2'-O-methylcytidine
  misc_feature 1..4: note = RNA
  misc_feature 6..23: note = RNA
  misc_feature 5: note = DNA
tgatgacgaagagcacagatggc

SEQ ID NO: 1332 - DNA, 23 bp, synthetic construct
  source 1..23: mol_type = other DNA
  modified_base 1: mod_base = OTHER; note = 2'-O-methyluridine-3'-phosphate 5'-(E)-Vinylphosphonate
  modified_base 2: mod_base = OTHER; note = 2'-deoxy-2'-fluorocytidine-3'-phosphate
  modified_base 3: mod_base = OTHER; note = 2'-O-methyluridine-3'-phosphate
  modified_base 4: mod_base = OTHER; note = 2'-O-methylguanosine-3'-phosphate
  modified_base 6: mod_base = OTHER; note = 2'-O-methyluridine-3'-phosphate
  modified_base 7: mod_base = OTHER; note = cytidine-2'-phosphate
  modified_base 8: mod_base = OTHER; note = 2'-O-methyladenosine-3'-phosphate
  modified_base 9: mod_base = OTHER; note = 2'-O-methylguanosine-3'-phosphate
  modified_base 10: mod_base = OTHER; note = 2'-O-methyladenosine-3'-phosphate
  modified_base 11: mod_base = OTHER; note = 2'-O-methyluridine-3'-phosphate
  modified_base 12: mod_base = OTHER; note = 2'-O-methylguanosine-3'-phosphate
  modified_base 13: mod_base = OTHER; note = 2'-O-methyladenosine-3'-phosphate
  modified_base 14: mod_base = OTHER; note = 2'-deoxy-2'-fluorocytidine-3'-phosphate
  modified_base 15: mod_base = OTHER; note = 2'-O-methylguanosine-3'-phosphate
  modified_base 16: mod_base = OTHER; note = 2'-deoxy-2'-fluoroadenosine-3'-phosphate
  modified_base 17: mod_base = OTHER; note = 2'-O-methyladenosine-3'-phosphate
  modified_base 18: mod_base = OTHER; note = 2'-O-methylguanosine-3'-phosphate
  modified_base 19: mod_base = OTHER; note = 2'-O-methyladenosine-3'-phosphate
  modified_base 20: mod_base = OTHER; note = 2'-O-methylguanosine-3'-phosphate
  modified_base 21: mod_base = OTHER; note = 2'-O-methylcytidine-3'-phosphorothioate
  modified_base 22: mod_base = OTHER; note = 2'-O-methyladenosine-3'-phosphorothioate
  modified_base 23: mod_base = OTHER; note = 2'-O-methylcytidine
  misc_feature 1..4: note = RNA
  misc_feature 6..23: note = RNA
  misc_feature 5: note = DNA
tctggtcagatgacgaagagcac

SEQ ID NO: 1333 - DNA, 23 bp, synthetic construct
  source 1..23: mol_type = other DNA
  modified_base 1: mod_base = OTHER; note = 2'-O-methyluridine-3'-phosphate 5'-(E)-Vinylphosphonate
  modified_base 2: mod_base = OTHER; note = 2'-deoxy-2'-fluoroadenosine-3'-phosphate
  modified_base 3: mod_base = OTHER; note = 2'-O-methyluridine-3'-phosphate
  modified_base 4: mod_base = OTHER; note = 2'-O-methyladenosine-3'-phosphate
  modified_base 6: mod_base = OTHER; note = 2'-O-methyluridine-3'-phosphate
  modified_base 7: mod_base = OTHER; note = guanosine-2'-phosphate
  modified_base 8: mod_base = OTHER; note = 2'-O-methyladenosine-3'-phosphate
  modified_base 9: mod_base = OTHER; note = 2'-O-methyladenosine-3'-phosphate
  modified_base 10: mod_base = OTHER; note = 2'-O-methylguanosine-3'-phosphate
  modified_base 11: mod_base = OTHER; note = 2'-O-methylguanosine-3'-phosphate
  modified_base 12: mod_base = OTHER; note = 2'-O-methylcytidine-3'-phosphate
  modified_base 13: mod_base = OTHER; note = 2'-O-methylguanosine-3'-phosphate
  modified_base 14: mod_base = OTHER; note = 2'-deoxy-2'-fluoroadenosine-3'-phosphate
  modified_base 15: mod_base = OTHER; note = 2'-O-methyladenosine-3'-phosphate
  modified_base 16: mod_base = OTHER; note = 2'-deoxy-2'-fluorocytidine-3'-phosphate
  modified_base 17: mod_base = OTHER; note = 2'-O-methyluridine-3'-phosphate
  modified_base 18: mod_base = OTHER; note = 2'-O-methylguanosine-3'-phosphate
  modified_base 19: mod_base = OTHER; note = 2'-O-methylcytidine-3'-phosphate
  modified_base 20: mod_base = OTHER; note = 2'-O-methyladenosine-3'-phosphate
  modified_base 21: mod_base = OTHER; note = 2'-O-methyluridine-3'-phosphorothioate
  modified_base 22: mod_base = OTHER; note = 2'-O-methyluridine-3'-phosphorothioate
  modified_base 23: mod_base = OTHER; note = 2'-O-methylcytidine
  misc_feature 1..4: note = RNA
  misc_feature 6..23: note = RNA
  misc_feature 5: note = DNA
tatagtgaaggcgaactgcattc

SEQ ID NO: 1334 - DNA, 23 bp, synthetic construct
  source 1..23: mol_type = other DNA
  modified_base 1: mod_base = OTHER; note = 2'-O-methyluridine-3'-phosphate 5'-(E)-Vinylphosphonate
  modified_base 2: mod_base = OTHER; note = 2'-deoxy-2'-fluorouridine-3'-phosphate
  modified_base 3: mod_base = OTHER; note = 2'-O-methylguanosine-3'-phosphate
  modified_base 4: mod_base = OTHER; note = 2'-O-methylguanosine-3'-phosphate
  modified_base 6: mod_base = OTHER; note = 2'-O-methyluridine-3'-phosphate
  modified_base 7: mod_base = OTHER; note = guanosine-2'-phosphate
  modified_base 8: mod_base = OTHER; note = 2'-O-methyluridine-3'-phosphate
  modified_base 9: mod_base = OTHER; note = 2'-O-methyladenosine-3'-phosphate
  modified_base 10: mod_base = OTHER; note = 2'-O-methyladenosine-3'-phosphate
  modified_base 11: mod_base = OTHER; note = 2'-O-methylguanosine-3'-phosphate
  modified_base 12: mod_base = OTHER; note = 2'-O-methyladenosine-3'-phosphate
  modified_base 13: mod_base = OTHER; note = 2'-O-methylguanosine-3'-phosphate
  modified_base 14: mod_base = OTHER; note = 2'-deoxy-2'-fluorocytidine-3'-phosphate
  modified_base 15: mod_base = OTHER; note = 2'-O-methyluridine-3'-phosphate
  modified_base 16: mod_base = OTHER; note = 2'-deoxy-2'-fluorouridine-3'-phosphate
  modified_base 17: mod_base = OTHER; note = 2'-O-methyladenosine-3'-phosphate
  modified_base 18: mod_base = OTHER; note = 2'-O-methyladenosine-3'-phosphate
  modified_base 19: mod_base = OTHER; note = 2'-O-methylcytidine-3'-phosphate
  modified_base 20: mod_base = OTHER; note = 2'-O-methylcytidine-3'-phosphate
  modified_base 21: mod_base = OTHER; note = 2'-O-methyladenosine-3'-phosphorothioate
  modified_base 22: mod_base = OTHER; note = 2'-O-methylcytidine-3'-phosphorothioate
  modified_base 23: mod_base = OTHER; note = 2'-O-methyladenosine
  misc_feature 1..4: note = RNA
  misc_feature 6..23: note = RNA
  misc_feature 5: note = DNA
ttgggtgtaagagcttaaccaca

SEQ ID NO: 1335 - DNA, 23 bp, synthetic construct
  source 1..23: mol_type = other DNA
  modified_base 1: mod_base = OTHER; note = 2'-O-methyluridine-3'-phosphate 5'-(E)-Vinylphosphonate
  modified_base 2: mod_base = OTHER; note = 2'-deoxy-2'-fluoroadenosine-3'-phosphate
  modified_base 3: mod_base = OTHER; note = 2'-O-methyluridine-3'-phosphate
  modified_base 4: mod_base = OTHER; note = 2'-O-methyluridine-3'-phosphate
  modified_base 6: mod_base = OTHER; note = 2'-O-methylcytidine-3'-phosphate
  modified_base 7: mod_base = OTHER; note = guanosine-2'-phosphate
  modified_base 8: mod_base = OTHER; note = 2'-O-methyladenosine-3'-phosphate
  modified_base 9: mod_base = OTHER; note = 2'-O-methyladenosine-3'-phosphate
  modified_base 10: mod_base = OTHER; note = 2'-O-methyluridine-3'-phosphate
  modified_base 11: mod_base = OTHER; note = 2'-O-methylcytidine-3'-phosphate
  modified_base 12: mod_base = OTHER; note = 2'-O-methyladenosine-3'-phosphate
  modified_base 13: mod_base = OTHER; note = 2'-O-methyladenosine-3'-phosphate
  modified_base 14: mod_base = OTHER; note = 2'-deoxy-2'-fluorouridine-3'-phosphate
  modified_base 15: mod_base = OTHER; note = 2'-O-methylcytidine-3'-phosphate
  modified_base 16: mod_base = OTHER; note = 2'-deoxy-2'-fluorocytidine-3'-phosphate
  modified_base 17: mod_base = OTHER; note = 2'-O-methyladenosine-3'-phosphate
  modified_base 18: mod_base = OTHER; note = 2'-O-methyladenosine-3'-phosphate
  modified_base 19: mod_base = OTHER; note = 2'-O-methylcytidine-3'-phosphate
  modified_base 20: mod_base = OTHER; note = 2'-O-methyladenosine-3'-phosphate
  modified_base 21: mod_base = OTHER; note = 2'-O-methylguanosine-3'-phosphorothioate
  modified_base 22: mod_base = OTHER; note = 2'-O-methyluridine-3'-phosphorothioate
  modified_base 23: mod_base = OTHER; note = 2'-O-methyladenosine
  misc_feature 1..4: note = RNA
  misc_feature 6..23: note = RNA
  misc_feature 5: note = DNA
tatttcgaatcaatccaacagta

SEQ ID NO: 1336 - DNA, 23 bp, synthetic construct
  source 1..23: mol_type = other DNA
  modified_base 1: mod_base = OTHER; note = 2'-O-methyluridine-3'-phosphate 5'-(E)-Vinylphosphonate
  modified_base 2: mod_base = OTHER; note = 2'-deoxy-2'-fluoroguanosine-3'-phosphate
  modified_base 3: mod_base = OTHER; note = 2'-O-methyladenosine-3'-phosphate
  modified_base 4: mod_base = OTHER; note = 2'-O-methyluridine-3'-phosphate
  modified_base 6: mod_base = OTHER; note = 2'-O-methyluridine-3'-phosphate
  modified_base 7: mod_base = OTHER; note = cytidine-2'-phosphate
  modified_base 8: mod_base = OTHER; note = 2'-O-methylguanosine-3'-phosphate
  modified_base 9: mod_base = OTHER; note = 2'-O-methyladenosine-3'-phosphate
  modified_base 10: mod_base = OTHER; note = 2'-O-methyladenosine-3'-phosphate
  modified_base 11: mod_base = OTHER; note = 2'-O-methyluridine-3'-phosphate
  modified_base 12: mod_base = OTHER; note = 2'-O-methylcytidine-3'-phosphate
  modified_base 13: mod_base = OTHER; note = 2'-O-methyladenosine-3'-phosphate
  modified_base 14: mod_base = OTHER; note = 2'-deoxy-2'-fluoroadenosine-3'-phosphate
  modified_base 15: mod_base = OTHER; note = 2'-O-methyluridine-3'-phosphate
  modified_base 16: mod_base = OTHER; note = 2'-deoxy-2'-fluorocytidine-3'-phosphate
  modified_base 17: mod_base = OTHER; note = 2'-O-methylcytidine-3'-phosphate
  modified_base 18: mod_base = OTHER; note = 2'-O-methyladenosine-3'-phosphate
  modified_base 19: mod_base = OTHER; note = 2'-O-methyladenosine-3'-phosphate
  modified_base 20: mod_base = OTHER; note = 2'-O-methylcytidine-3'-phosphate
  modified_base 21: mod_base = OTHER; note = 2'-O-methyladenosine-3'-phosphorothioate
  modified_base 22: mod_base = OTHER; note = 2'-O-methylguanosine-3'-phosphorothioate
  modified_base 23: mod_base = OTHER; note = 2'-O-methyluridine
  misc_feature 1..4: note = RNA
  misc_feature 6..23: note = RNA
  misc_feature 5: note = DNA
tgatttcgaatcaatccaacagt

SEQ ID NO: 1337 - DNA, 23 bp, synthetic construct
  source 1..23: mol_type = other DNA
  modified_base 1: mod_base = OTHER; note = 2'-O-methyluridine-3'-phosphate 5'-(E)-Vinylphosphonate
  modified_base 2: mod_base = OTHER; note = 2'-deoxy-2'-fluoroguanosine-3'-phosphate
  modified_base 3: mod_base = OTHER; note = 2'-O-methylguanosine-3'-phosphate
  modified_base 4: mod_base = OTHER; note = 2'-O-methyladenosine-3'-phosphate
  modified_base 6: mod_base = OTHER; note = 2'-O-methyluridine-3'-phosphate
  modified_base 7: mod_base = OTHER; note = guanosine-2'-phosphate
  modified_base 8: mod_base = OTHER; note = 2'-O-methylguanosine-3'-phosphate
  modified_base 9: mod_base = OTHER; note = 2'-O-methylcytidine-3'-phosphate
  modified_base 10: mod_base = OTHER; note = 2'-O-methyladenosine-3'-phosphate
  modified_base 11: mod_base = OTHER; note = 2'-O-methylcytidine-3'-phosphate
  modified_base 12: mod_base = OTHER; note = 2'-O-methylcytidine-3'-phosphate
  modified_base 13: mod_base = OTHER; note = 2'-O-methylcytidine-3'-phosphate
  modified_base 14: mod_base = OTHER; note = 2'-deoxy-2'-fluorouridine-3'-phosphate
  modified_base 15: mod_base = OTHER; note = 2'-O-methylguanosine-3'-phosphate
  modified_base 16: mod_base = OTHER; note = 2'-deoxy-2'-fluorocytidine-3'-phosphate
  modified_base 17: mod_base = OTHER; note = 2'-O-methyluridine-3'-phosphate
  modified_base 18: mod_base = OTHER; note = 2'-O-methylcytidine-3'-phosphate
  modified_base 19: mod_base = OTHER; note = 2'-O-methyladenosine-3'-phosphate
  modified_base 20: mod_base = OTHER; note = 2'-O-methylcytidine-3'-phosphate
  modified_base 21: mod_base = OTHER; note = 2'-O-methylguanosine-3'-phosphorothioate
  modified_base 22: mod_base = OTHER; note = 2'-O-methylcytidine-3'-phosphorothioate
  modified_base 23: mod_base = OTHER; note = 2'-O-methyladenosine
  misc_feature 1..4: note = RNA
  misc_feature 6..23: note = RNA
  misc_feature 5: note = DNA
tggaatggcaccctgctcacgca

SEQ ID NO: 1338 - DNA, 23 bp, synthetic construct
  source 1..23: mol_type = other DNA
  modified_base 1: mod_base = OTHER; note = 2'-O-methyluridine-3'-phosphate 5'-(E)-Vinylphosphonate
  modified_base 2: mod_base = OTHER; note = 2'-deoxy-2'-fluoroadenosine-3'-phosphate
  modified_base 3: mod_base = OTHER; note = 2'-O-methylguanosine-3'-phosphate
  modified_base 4: mod_base = OTHER; note = 2'-O-methylcytidine-3'-phosphate
  modified_base 6: mod_base = OTHER; note = 2'-O-methyladenosine-3'-phosphate
  modified_base 7: mod_base = OTHER; note = cytidine-2'-phosphate
  modified_base 8: mod_base = OTHER; note = 2'-O-methyluridine-3'-phosphate
  modified_base 9: mod_base = OTHER; note = 2'-O-methylguanosine-3'-phosphate
  modified_base 10: mod_base = OTHER; note = 2'-O-methyladenosine-3'-phosphate
  modified_base 11: mod_base = OTHER; note = 2'-O-methyladenosine-3'-phosphate
  modified_base 12: mod_base = OTHER; note = 2'-O-methylcytidine-3'-phosphate
  modified_base 13: mod_base = OTHER; note = 2'-O-methyluridine-3'-phosphate
  modified_base 14: mod_base = OTHER; note = 2'-deoxy-2'-fluoroadenosine-3'-phosphate
  modified_base 15: mod_base = OTHER; note = 2'-O-methylguanosine-3'-phosphate
  modified_base 16: mod_base = OTHER; note = 2'-deoxy-2'-fluorouridine-3'-phosphate
  modified_base 17: mod_base = OTHER; note = 2'-O-methylcytidine-3'-phosphate
  modified_base 18: mod_base = OTHER; note = 2'-O-methylguanosine-3'-phosphate
  modified_base 19: mod_base = OTHER; note = 2'-O-methyluridine-3'-phosphate
  modified_base 20: mod_base = OTHER; note = 2'-O-methylguanosine-3'-phosphate
  modified_base 21: mod_base = OTHER; note = 2'-O-methylguanosine-3'-phosphorothioate
  modified_base 22: mod_base = OTHER; note = 2'-O-methyladenosine-3'-phosphorothioate
  modified_base 23: mod_base = OTHER; note = 2'-O-methyladenosine
  misc_feature 1..4: note = RNA
  misc_feature 6..23: note = RNA
  misc_feature 5: note = DNA
tagcaactgaactagtcgtggaa

SEQ ID NO: 1339 - DNA, 23 bp, synthetic construct
  source 1..23: mol_type = other DNA
  modified_base 1: mod_base = OTHER; note = 2'-O-methyluridine-3'-phosphate 5'-(E)-Vinylphosphonate
  modified_base 2: mod_base = OTHER; note = 2'-deoxy-2'-fluorouridine-3'-phosphate
  modified_base 3: mod_base = OTHER; note = 2'-O-methylguanosine-3'-phosphate
  modified_base 4: mod_base = OTHER; note = 2'-O-methylcytidine-3'-phosphate
  modified_base 6: mod_base = OTHER; note = 2'-O-methylcytidine-3'-phosphate
  modified_base 7: mod_base = OTHER; note = guanosine-2'-phosphate
  modified_base 8: mod_base = OTHER; note = 2'-O-methyladenosine-3'-phosphate
  modified_base 9: mod_base = OTHER; note = 2'-O-methyladenosine-3'-phosphate
  modified_base 10: mod_base = OTHER; note = 2'-O-methylcytidine-3'-phosphate
  modified_base 11: mod_base = OTHER; note = 2'-O-methyladenosine-3'-phosphate
  modified_base 12: mod_base = OTHER; note = 2'-O-methyladenosine-3'-phosphate
  modified_base 13: mod_base = OTHER; note = 2'-O-methylguanosine-3'-phosphate
  modified_base 14: mod_base = OTHER; note = 2'-deoxy-2'-fluorocytidine-3'-phosphate
  modified_base 15: mod_base = OTHER; note = 2'-O-methyladenosine-3'-phosphate
  modified_base 16: mod_base = OTHER; note = 2'-deoxy-2'-fluoroadenosine-3'-phosphate
  modified_base 17: mod_base = OTHER; note = 2'-O-methylcytidine-3'-phosphate
  modified_base 18: mod_base = OTHER; note = 2'-O-methyluridine-3'-phosphate
  modified_base 19: mod_base = OTHER; note = 2'-O-methylguanosine-3'-phosphate
  modified_base 20: mod_base = OTHER; note = 2'-O-methyladenosine-3'-phosphate
  modified_base 21: mod_base = OTHER; note = 2'-O-methyladenosine-3'-phosphorothioate
  modified_base 22: mod_base = OTHER; note = 2'-O-methylcytidine-3'-phosphorothioate
  modified_base 23: mod_base = OTHER; note = 2'-O-methyluridine
  misc_feature 1..4: note = RNA
  misc_feature 6..23: note = RNA
  misc_feature 5: note = DNA
ttgcacgaacaagcaactgaact

SEQ ID NO: 1340 - DNA, 23 bp, synthetic construct
  source 1..23: mol_type = other DNA
  modified_base 1: mod_base = OTHER; note = 2'-O-methyluridine-3'-phosphate 5'-(E)-Vinylphosphonate
  modified_base 2: mod_base = OTHER; note = 2'-deoxy-2'-fluoroguanosine-3'-phosphate
  modified_base 3: mod_base = OTHER; note = 2'-O-methyluridine-3'-phosphate
  modified_base 4: mod_base = OTHER; note = 2'-O-methylguanosine-3'-phosphate
  modified_base 6: mod_base = OTHER; note = 2'-O-methyladenosine-3'-phosphate
  modified_base 7: mod_base = OTHER; note = cytidine-2'-phosphate
  modified_base 8: mod_base = OTHER; note = 2'-O-methylguanosine-3'-phosphate
  modified_base 9: mod_base = OTHER; note = 2'-O-methyladenosine-3'-phosphate
  modified_base 10: mod_base = OTHER; note = 2'-O-methyladenosine-3'-phosphate
  modified_base 11: mod_base = OTHER; note = 2'-O-methylcytidine-3'-phosphate
  modified_base 12: mod_base = OTHER; note = 2'-O-methyladenosine-3'-phosphate
  modified_base 13: mod_base = OTHER; note = 2'-O-methyladenosine-3'-phosphate
  modified_base 14: mod_base = OTHER; note = 2'-deoxy-2'-fluoroguanosine-3'-phosphate
  modified_base 15: mod_base = OTHER; note = 2'-O-methylcytidine-3'-phosphate
  modified_base 16: mod_base = OTHER; note = 2'-deoxy-2'-fluoroadenosine-3'-phosphate
  modified_base 17: mod_base = OTHER; note = 2'-O-methyladenosine-3'-phosphate
  modified_base 18: mod_base = OTHER; note = 2'-O-methylcytidine-3'-phosphate
  modified_base 19: mod_base = OTHER; note = 2'-O-methyluridine-3'-phosphate
  modified_base 20: mod_base = OTHER; note = 2'-O-methylguanosine-3'-phosphate
  modified_base 21: mod_base = OTHER; note = 2'-O-methyladenosine-3'-phosphorothioate
  modified_base 22: mod_base = OTHER; note = 2'-O-methyladenosine-3'-phosphorothioate
  modified_base 23: mod_base = OTHER; note = 2'-O-methylcytidine
  misc_feature 1..4: note = RNA
  misc_feature 6..23: note = RNA
  misc_feature 5: note = DNA
tgtgcacgaacaagcaactgaac

SEQ ID NO: 1341 - DNA, 23 bp, synthetic construct
  source 1..23: mol_type = other DNA
  modified_base 1: mod_base = OTHER; note = 2'-O-methyluridine-3'-phosphate 5'-(E)-Vinylphosphonate
  modified_base 2: mod_base = OTHER; note = 2'-deoxy-2'-fluoroadenosine-3'-phosphate
  modified_base 3: mod_base = OTHER; note = 2'-O-methyluridine-3'-phosphate
  modified_base 4: mod_base = OTHER; note = 2'-O-methylguanosine-3'-phosphate
  modified_base 6: mod_base = OTHER; note = 2'-O-methylguanosine-3'-phosphate
  modified_base 7: mod_base = OTHER; note = cytidine-2'-phosphate
  modified_base 8: mod_base = OTHER; note = 2'-O-methyladenosine-3'-phosphate
  modified_base 9: mod_base = OTHER; note = 2'-O-methylcytidine-3'-phosphate
  modified_base 10: mod_base = OTHER; note = 2'-O-methylguanosine-3'-phosphate
  modified_base 11: mod_base = OTHER; note = 2'-O-methyladenosine-3'-phosphate
  modified_base 12: mod_base = OTHER; note = 2'-O-methyladenosine-3'-phosphate
  modified_base 13: mod_base = OTHER; note = 2'-O-methylcytidine-3'-phosphate
  modified_base 14: mod_base = OTHER; note = 2'-deoxy-2'-fluoroadenosine-3'-phosphate
  modified_base 15: mod_base = OTHER; note = 2'-O-methyladenosine-3'-phosphate
  modified_base 16: mod_base = OTHER; note = 2'-deoxy-2'-fluoroguanosine-3'-phosphate
  modified_base 17: mod_base = OTHER; note = 2'-O-methylcytidine-3'-phosphate
  modified_base 18: mod_base = OTHER; note = 2'-O-methyladenosine-3'-phosphate
  modified_base 19: mod_base = OTHER; note = 2'-O-methyladenosine-3'-phosphate
  modified_base 20: mod_base = OTHER; note = 2'-O-methylcytidine-3'-phosphate
  modified_base 21: mod_base = OTHER; note = 2'-O-methyluridine-3'-phosphorothioate
  modified_base 22: mod_base = OTHER; note = 2'-O-methylguanosine-3'-phosphorothioate
  modified_base 23: mod_base = OTHER; note = 2'-O-methyladenosine
  misc_feature 1..4: note = RNA
  misc_feature 6..23: note = RNA
  misc_feature 5: note = DNA
tatgtgcacgaacaagcaactga

SEQ ID NO: 1342 - DNA, 23 bp, synthetic construct
  source 1..23: mol_type = other DNA
  modified_base 1: mod_base = OTHER; note = 2'-O-methyluridine-3'-phosphate 5'-(E)-Vinylphosphonate
  modified_base 2: mod_base = OTHER; note = 2'-deoxy-2'-fluoroguanosine-3'-phosphate
  modified_base 3: mod_base = OTHER; note = 2'-O-methyladenosine-3'-phosphate
  modified_base 4: mod_base = OTHER; note = 2'-O-methyladenosine-3'-phosphate
  modified_base 6: mod_base = OTHER; note = 2'-O-methylguanosine-3'-phosphate
  modified_base 7: mod_base = OTHER; note = guanosine-2'-phosphate
  modified_base 8: mod_base = OTHER; note = 2'-O-methyluridine-3'-phosphate
  modified_base 9: mod_base = OTHER; note = 2'-O-methyladenosine-3'-phosphate
  modified_base 10: mod_base = OTHER; note = 2'-O-methyluridine-3'-phosphate
  modified_base 11: mod_base = OTHER; note = 2'-O-methyluridine-3'-phosphate
  modified_base 12: mod_base = OTHER; note = 2'-O-methyluridine-3'-phosphate
  modified_base 13: mod_base = OTHER; note = 2'-O-methyladenosine-3'-phosphate
  modified_base 14: mod_base = OTHER; note = 2'-deoxy-2'-fluoroguanosine-3'-phosphate
  modified_base 15: mod_base = OTHER; note = 2'-O-methyluridine-3'-phosphate
  modified_base 16: mod_base = OTHER; note = 2'-deoxy-2'-fluorocytidine-3'-phosphate
  modified_base 17: mod_base = OTHER; note = 2'-O-methylcytidine-3'-phosphate
  modified_base 18: mod_base = OTHER; note = 2'-O-methyluridine-3'-phosphate
  modified_base 19: mod_base = OTHER; note = 2'-O-methylcytidine-3'-phosphate
  modified_base 20: mod_base = OTHER; note = 2'-O-methyluridine-3'-phosphate
  modified_base 21: mod_base = OTHER; note = 2'-O-methylguanosine-3'-phosphorothioate
  modified_base 22: mod_base = OTHER; note = 2'-O-methyladenosine-3'-phosphorothioate
  modified_base 23: mod_base = OTHER; note = 2'-O-methyluridine
  misc_feature 1..4: note = RNA
  misc_feature 6..23: note = RNA
  misc_feature 5: note = DNA
tgaatggtatttagtcctctgat

SEQ ID NO: 1343 - DNA, 23 bp, synthetic construct
  source 1..23: mol_type = other DNA
  modified_base 1: mod_base = OTHER; note = 2'-O-methyluridine-3'-phosphate 5'-(E)-Vinylphosphonate
  modified_base 2: mod_base = OTHER; note = 2'-deoxy-2'-fluorocytidine-3'-phosphate
  modified_base 3: mod_base = OTHER; note = 2'-O-methyladenosine-3'-phosphate
  modified_base 4: mod_base = OTHER; note = 2'-O-methyladenosine-3'-phosphate
  modified_base 6: mod_base = OTHER; note = 2'-O-methylguanosine-3'-phosphate
  modified_base 7: mod_base = OTHER; note = guanosine-2'-phosphate
  modified_base 8: mod_base = OTHER; note = 2'-O-methyladenosine-3'-phosphate
  modified_base 9: mod_base = OTHER; note = 2'-O-methyladenosine-3'-phosphate
  modified_base 10: mod_base = OTHER; note = 2'-O-methyluridine-3'-phosphate
  modified_base 11: mod_base = OTHER; note = 2'-O-methylguanosine-3'-phosphate
  modified_base 12: mod_base = OTHER; note = 2'-O-methylguanosine-3'-phosphate
  modified_base 13: mod_base = OTHER; note = 2'-O-methyluridine-3'-phosphate
  modified_base 14: mod_base = OTHER; note = 2'-deoxy-2'-fluoroadenosine-3'-phosphate
  modified_base 15: mod_base = OTHER; note = 2'-O-methyluridine-3'-phosphate
  modified_base 16: mod_base = OTHER; note = 2'-deoxy-2'-fluorouridine-3'-phosphate
  modified_base 17: mod_base = OTHER; note = 2'-O-methyluridine-3'-phosphate
  modified_base 18: mod_base = OTHER; note = 2'-O-methyladenosine-3'-phosphate
  modified_base 19: mod_base = OTHER; note = 2'-O-methylguanosine-3'-phosphate
  modified_base 20: mod_base = OTHER; note = 2'-O-methyluridine-3'-phosphate
  modified_base 21: mod_base = OTHER; note = 2'-O-methylcytidine-3'-phosphorothioate
  modified_base 22: mod_base = OTHER; note = 2'-O-methylcytidine-3'-phosphorothioate
  modified_base 23: mod_base = OTHER; note = 2'-O-methyluridine
  misc_feature 1..4: note = RNA
  misc_feature 6..23: note = RNA
  misc_feature 5: note = DNA
tcaatggaatggtatttagtcct

SEQ ID NO: 1344 - DNA, 23 bp, synthetic construct
  source 1..23: mol_type = other DNA
  modified_base 1: mod_base = OTHER; note = 2'-O-methyluridine-3'-phosphate 5'-(E)-Vinylphosphonate
  modified_base 2: mod_base = OTHER; note = 2'-deoxy-2'-fluorocytidine-3'-phosphate
  modified_base 3: mod_base = OTHER; note = 2'-O-methyluridine-3'-phosphate
  modified_base 4: mod_base = OTHER; note = 2'-O-methylguanosine-3'-phosphate
  modified_base 6: mod_base = OTHER; note = 2'-O-methyladenosine-3'-phosphate
  modified_base 7: mod_base = OTHER; note = cytidine-2'-phosphate
  modified_base 8: mod_base = OTHER; note = 2'-O-methyladenosine-3'-phosphate
  modified_base 9: mod_base = OTHER; note = 2'-O-methyladenosine-3'-phosphate
  modified_base 10: mod_base = OTHER; note = 2'-O-methyladenosine-3'-phosphate
  modified_base 11: mod_base = OTHER; note = 2'-O-methylcytidine-3'-phosphate
  modified_base 12: mod_base = OTHER; note = 2'-O-methyladenosine-3'-phosphate
  modified_base 13: mod_base = OTHER; note = 2'-O-methyladenosine-3'-phosphate
  modified_base 14: mod_base = OTHER; note = 2'-deoxy-2'-fluorouridine-3'-phosphate
  modified_base 15: mod_base = OTHER; note = 2'-O-methylguanosine-3'-phosphate
  modified_base 16: mod_base = OTHER; note = 2'-deoxy-2'-fluoroguanosine-3'-phosphate
  modified_base 17: mod_base = OTHER; note = 2'-O-methyladenosine-3'-phosphate
  modified_base 18: mod_base = OTHER; note = 2'-O-methyladenosine-3'-phosphate
  modified_base 19: mod_base = OTHER; note = 2'-O-methyluridine-3'-phosphate
  modified_base 20: mod_base = OTHER; note = 2'-O-methylguanosine-3'-phosphate
  modified_base 21: mod_base = OTHER; note = 2'-O-methylguanosine-3'-phosphorothioate
  modified_base 22: mod_base = OTHER; note = 2'-O-methyluridine-3'-phosphorothioate
  modified_base 23: mod_base = OTHER; note = 2'-O-methyladenosine
  misc_feature 1..4: note = RNA
  misc_feature 6..23: note = RNA
  misc_feature 5: note = DNA
tctgcacaaacaatggaatggta

SEQ ID NO: 1345 - DNA, 23 bp, synthetic construct
  source 1..23: mol_type = other DNA
  modified_base 1: mod_base = OTHER; note = 2'-O-methyluridine-3'-phosphate 5'-(E)-Vinylphosphonate
  modified_base 2: mod_base = OTHER; note = 2'-deoxy-2'-fluoroadenosine-3'-phosphate
  modified_base 3: mod_base = OTHER; note = 2'-O-methylguanosine-3'-phosphate
  modified_base 4: mod_base = OTHER; note = 2'-O-methylcytidine-3'-phosphate
  modified_base 6: mod_base = OTHER; note = 2'-O-methylguanosine-3'-phosphate
  modified_base 7: mod_base = OTHER; note = cytidine-2'-phosphate
  modified_base 8: mod_base = OTHER; note = 2'-O-methyladenosine-3'-phosphate
  modified_base 9: mod_base = OTHER; note = 2'-O-methylcytidine-3'-phosphate
  modified_base 10: mod_base = OTHER; note = 2'-O-methyladenosine-3'-phosphate
  modified_base 11: mod_base = OTHER; note = 2'-O-methyladenosine-3'-phosphate
  modified_base 12: mod_base = OTHER; note = 2'-O-methyladenosine-3'-phosphate
  modified_base 13: mod_base = OTHER; note = 2'-O-methylcytidine-3'-phosphate
  modified_base 14: mod_base = OTHER; note = 2'-deoxy-2'-fluoroadenosine-3'-phosphate
  modified_base 15: mod_base = OTHER; note = 2'-O-methyladenosine-3'-phosphate
  modified_base 16: mod_base = OTHER; note = 2'-deoxy-2'-fluorouridine-3'-phosphate
  modified_base 17: mod_base = OTHER; note = 2'-O-methylguanosine-3'-phosphate
  modified_base 18: mod_base = OTHER; note = 2'-O-methylguanosine-3'-phosphate
  modified_base 19: mod_base = OTHER; note = 2'-O-methyladenosine-3'-phosphate
  modified_base 20: mod_base = OTHER; note = 2'-O-methyladenosine-3'-phosphate
  modified_base 21: mod_base = OTHER; note = 2'-O-methyluridine-3'-phosphorothioate
  modified_base 22: mod_base = OTHER; note = 2'-O-methylguanosine-3'-phosphorothioate
  modified_base 23: mod_base = OTHER; note = 2'-O-methylguanosine
  misc_feature 1..4: note = RNA
  misc_feature 6..23: note = RNA
  misc_feature 5: note = DNA
tagctgcacaaacaatggaatgg

SEQ ID NO: 1346 - DNA, 23 bp, synthetic construct
  source 1..23: mol_type = other DNA
  modified_base 1: mod_base = OTHER; note = 2'-O-methyluridine-3'-phosphate 5'-(E)-Vinylphosphonate
  modified_base 2: mod_base = OTHER; note = 2'-deoxy-2'-fluorocytidine-3'-phosphate
  modified_base 3: mod_base = OTHER; note = 2'-O-methyladenosine-3'-phosphate
  modified_base 4: mod_base = OTHER; note = 2'-O-methylguanosine-3'-phosphate
  modified_base 6: mod_base = OTHER; note = 2'-O-methyluridine-3'-phosphate
  modified_base 7: mod_base = OTHER; note = guanosine-2'-phosphate
  modified_base 8: mod_base = OTHER; note = 2'-O-methylcytidine-3'-phosphate
  modified_base 9: mod_base = OTHER; note = 2'-O-methyladenosine-3'-phosphate
  modified_base 10: mod_base = OTHER; note = 2'-O-methylcytidine-3'-phosphate
  modified_base 11: mod_base = OTHER; note = 2'-O-methyladenosine-3'-phosphate
  modified_base 12: mod_base = OTHER; note = 2'-O-methyladenosine-3'-phosphate
  modified_base 13: mod_base = OTHER; note = 2'-O-methyladenosine-3'-phosphate
  modified_base 14: mod_base = OTHER; note = 2'-deoxy-2'-fluorocytidine-3'-phosphate
  modified_base 15: mod_base = OTHER; note = 2'-O-methyladenosine-3'-phosphate
  modified_base 16: mod_base = OTHER; note = 2'-deoxy-2'-fluoroadenosine-3'-phosphate
  modified_base 17: mod_base = OTHER; note = 2'-O-methyluridine-3'-phosphate
  modified_base 18: mod_base = OTHER; note = 2'-O-methylguanosine-3'-phosphate
  modified_base 19: mod_base = OTHER; note = 2'-O-methylguanosine-3'-phosphate
  modified_base 20: mod_base = OTHER; note = 2'-O-methyladenosine-3'-phosphate
  modified_base 21: mod_base = OTHER; note = 2'-O-methyladenosine-3'-phosphorothioate
  modified_base 22: mod_base = OTHER; note = 2'-O-methyluridine-3'-phosphorothioate
  modified_base 23: mod_base = OTHER; note = 2'-O-methylguanosine
  misc_feature 1..4: note = RNA
  misc_feature 6..23: note = RNA
  misc_feature 5: note = DNA
tcagctgcacaaacaatggaatg

SEQ ID NO: 1347 - DNA, 23 bp, synthetic construct
  source 1..23: mol_type = other DNA
  modified_base 1: mod_base = OTHER; note = 2'-O-methyluridine-3'-phosphate 5'-(E)-Vinylphosphonate
  modified_base 2: mod_base = OTHER; note = 2'-deoxy-2'-fluoroadenosine-3'-phosphate
  modified_base 3: mod_base = OTHER; note = 2'-O-methylguanosine-3'-phosphate
  modified_base 4: mod_base = OTHER; note = 2'-O-methylcytidine-3'-phosphate
  modified_base 6: mod_base = OTHER; note = 2'-O-methylguanosine-3'-phosphate
  modified_base 7: mod_base = OTHER; note = cytidine-2'-phosphate
  modified_base 8: mod_base = OTHER; note = 2'-O-methyluridine-3'-phosphate
  modified_base 9: mod_base = OTHER; note = 2'-O-methylguanosine-3'-phosphate
  modified_base 10: mod_base = OTHER; note = 2'-O-methylcytidine-3'-phosphate
  modified_base 11: mod_base = OTHER; note = 2'-O-methyladenosine-3'-phosphate
  modified_base 12: mod_base = OTHER; note = 2'-O-methylcytidine-3'-phosphate
  modified_base 13: mod_base = OTHER; note = 2'-O-methyladenosine-3'-phosphate
  modified_base 14: mod_base = OTHER; note = 2'-deoxy-2'-fluoroadenosine-3'-phosphate
  modified_base 15: mod_base = OTHER; note = 2'-O-methyladenosine-3'-phosphate
  modified_base 16: mod_base = OTHER; note = 2'-deoxy-2'-fluorocytidine-3'-phosphate
  modified_base 17: mod_base = OTHER; note = 2'-O-methyladenosine-3'-phosphate
  modified_base 18: mod_base = OTHER; note = 2'-O-methyladenosine-3'-phosphate
  modified_base 19: mod_base = OTHER; note = 2'-O-methyluridine-3'-phosphate
  modified_base 20: mod_base = OTHER; note = 2'-O-methylguanosine-3'-phosphate
  modified_base 21: mod_base = OTHER; note = 2'-O-methylguanosine-3'-phosphorothioate
  modified_base 22: mod_base = OTHER; note = 2'-O-methyladenosine-3'-phosphorothioate
  modified_base 23: mod_base = OTHER; note = 2'-O-methyladenosine
  misc_feature 1..4: note = RNA
  misc_feature 6..23: note = RNA
  misc_feature 5: note = DNA
tagcagctgcacaaacaatggaa

SEQ ID NO: 1348 - DNA, 23 bp, synthetic construct
  source 1..23: mol_type = other DNA
  modified_base 1: mod_base = OTHER; note = 2'-O-methyluridine-3'-phosphate 5'-(E)-Vinylphosphonate
  modified_base 2: mod_base = OTHER; note = 2'-deoxy-2'-fluorouridine-3'-phosphate
  modified_base 3: mod_base = OTHER; note = 2'-O-methylcytidine-3'-phosphate
  modified_base 4: mod_base = OTHER; note = 2'-O-methyluridine-3'-phosphate
  modified_base 6: mod_base = OTHER; note = 2'-O-methyluridine-3'-phosphate
  modified_base 7: mod_base = OTHER; note = cytidine-2'-phosphate
  modified_base 8: mod_base = OTHER; note = 2'-O-methyladenosine-3'-phosphate
  modified_base 9: mod_base = OTHER; note = 2'-O-methylguanosine-3'-phosphate
  modified_base 10: mod_base = OTHER; note = 2'-O-methyladenosine-3'-phosphate
  modified_base 11: mod_base = OTHER; note = 2'-O-methylguanosine-3'-phosphate
  modified_base 12: mod_base = OTHER; note = 2'-O-methylguanosine-3'-phosphate
  modified_base 13: mod_base = OTHER; note = 2'-O-methyladenosine-3'-phosphate
  modified_base 14: mod_base = OTHER; note = 2'-deoxy-2'-fluoroguanosine-3'-phosphate
  modified_base 15: mod_base = OTHER; note = 2'-O-methylcytidine-3'-phosphate
  modified_base 16: mod_base = OTHER; note = 2'-deoxy-2'-fluorouridine-3'-phosphate
  modified_base 17: mod_base = OTHER; note = 2'-O-methylguanosine-3'-phosphate
  modified_base 18: mod_base = OTHER; note = 2'-O-methyluridine-3'-phosphate
  modified_base 19: mod_base = OTHER; note = 2'-O-methylguanosine-3'-phosphate
  modified_base 20: mod_base = OTHER; note = 2'-O-methylguanosine-3'-phosphate
  modified_base 21: mod_base = OTHER; note = 2'-O-methylcytidine-3'-phosphorothioate
  modified_base 22: mod_base = OTHER; note = 2'-O-methyluridine-3'-phosphorothioate
  modified_base 23: mod_base = OTHER; note = 2'-O-methylcytidine
  misc_feature 1..4: note = RNA
  misc_feature 6..23: note = RNA
  misc_feature 5: note = DNA
ttctgtcagaggagctgtggctc

SEQ ID NO: 1349 - DNA, 23 bp, synthetic construct
  source 1..23: mol_type = other DNA
  modified_base 1: mod_base = OTHER; note = 2'-O-methyluridine-3'-phosphate 5'-(E)-Vinylphosphonate
  modified_base 2: mod_base = OTHER; note = 2'-deoxy-2'-fluorouridine-3'-phosphate
  modified_base 3: mod_base = OTHER; note = 2'-O-methyluridine-3'-phosphate
  modified_base 4: mod_base = OTHER; note = 2'-O-methylcytidine-3'-phosphate
  modified_base 6: mod_base = OTHER; note = 2'-O-methyluridine-3'-phosphate
  modified_base 7: mod_base = OTHER; note = guanosine-2'-phosphate
  modified_base 8: mod_base = OTHER; note = 2'-O-methyluridine-3'-phosphate
  modified_base 9: mod_base = OTHER; note = 2'-O-methyladenosine-3'-phosphate
  modified_base 10: mod_base = OTHER; note = 2'-O-methyladenosine-3'-phosphate
  modified_base 11: mod_base = OTHER; note = 2'-O-methyluridine-3'-phosphate
  modified_base 12: mod_base = OTHER; note = 2'-O-methylcytidine-3'-phosphate
  modified_base 13: mod_base = OTHER; note = 2'-O-methyluridine-3'-phosphate
  modified_base 14: mod_base = OTHER; note = 2'-deoxy-2'-fluorouridine-3'-phosphate
  modified_base 15: mod_base = OTHER; note = 2'-O-methylguanosine-3'-phosphate
  modified_base 16: mod_base = OTHER; note = 2'-deoxy-2'-fluorouridine-3'-phosphate
  modified_base 17: mod_base = OTHER; note = 2'-O-methylguanosine-3'-phosphate
  modified_base 18: mod_base = OTHER; note = 2'-O-methylguanosine-3'-phosphate
  modified_base 19: mod_base = OTHER; note = 2'-O-methylcytidine-3'-phosphate
  modified_base 20: mod_base = OTHER; note = 2'-O-methyluridine-3'-phosphate
  modified_base 21: mod_base = OTHER; note = 2'-O-methyluridine-3'-phosphorothioate
  modified_base 22: mod_base = OTHER; note = 2'-O-methylguanosine-3'-phosphorothioate
  modified_base 23: mod_base = OTHER; note = 2'-O-methyluridine
  misc_feature 1..4: note = RNA
  misc_feature 6..23: note = RNA
  misc_feature 5: note = DNA
tttcttgtaatcttgtggcttgt

SEQ ID NO: 1350 - DNA, 23 bp, synthetic construct
  source 1..23: mol_type = other DNA
  modified_base 1: mod_base = OTHER; note = 2'-O-methyluridine-3'-phosphate 5'-(E)-Vinylphosphonate
  modified_base 2: mod_base = OTHER; note = 2'-deoxy-2'-fluorocytidine-3'-phosphate
  modified_base 3: mod_base = OTHER; note = 2'-O-methylguanosine-3'-phosphate
  modified_base 4: mod_base = OTHER; note = 2'-O-methyluridine-3'-phosphate
  modified_base 6: mod_base = OTHER; note = 2'-O-methyluridine-3'-phosphate
  modified_base 7: mod_base = OTHER; note = cytidine-2'-phosphate
  modified_base 8: mod_base = OTHER; note = 2'-O-methyluridine-3'-phosphate
  modified_base 9: mod_base = OTHER; note = 2'-O-methyluridine-3'-phosphate
  modified_base 10: mod_base = OTHER; note = 2'-O-methylguanosine-3'-phosphate
  modified_base 11: mod_base = OTHER; note = 2'-O-methyluridine-3'-phosphate
  modified_base 12: mod_base = OTHER; note = 2'-O-methyladenosine-3'-phosphate
  modified_base 13: mod_base = OTHER; note = 2'-O-methyladenosine-3'-phosphate
  modified_base 14: mod_base = OTHER; note = 2'-deoxy-2'-fluorouridine-3'-phosphate
  modified_base 15: mod_base = OTHER; note = 2'-O-methylcytidine-3'-phosphate
  modified_base 16: mod_base = OTHER; note = 2'-deoxy-2'-fluorouridine-3'-phosphate
  modified_base 17: mod_base = OTHER; note = 2'-O-methyluridine-3'-phosphate
  modified_base 18: mod_base = OTHER; note = 2'-O-methylguanosine-3'-phosphate
  modified_base 19: mod_base = OTHER; note = 2'-O-methyluridine-3'-phosphate
  modified_base 20: mod_base = OTHER; note = 2'-O-methylguanosine-3'-phosphate
  modified_base 21: mod_base = OTHER; note = 2'-O-methylguanosine-3'-phosphorothioate
  modified_base 22: mod_base = OTHER; note = 2'-O-methylcytidine-3'-phosphorothioate
  modified_base 23: mod_base = OTHER; note = 2'-O-methyluridine
  misc_feature 1..4: note = RNA
  misc_feature 6..23: note = RNA
  misc_feature 5: note = DNA
tcgtttcttgtaatcttgtggct

SEQ ID NO: 1351 - DNA, 23 bp, synthetic construct
  source 1..23: mol_type = other DNA
  modified_base 1: mod_base = OTHER; note = 2'-O-methyluridine-3'-phosphate 5'-(E)-Vinylphosphonate
  modified_base 2: mod_base = OTHER; note = 2'-deoxy-2'-fluoroadenosine-3'-phosphate
  modified_base 3: mod_base = OTHER; note = 2'-O-methyladenosine-3'-phosphate
  modified_base 4: mod_base = OTHER; note = 2'-O-methylguanosine-3'-phosphate
  modified_base 6: mod_base = OTHER; note = 2'-O-methylcytidine-3'-phosphate
  modified_base 7: mod_base = OTHER; note = guanosine-2'-phosphate
  modified_base 8: mod_base = OTHER; note = 2'-O-methyluridine-3'-phosphate
  modified_base 9: mod_base = OTHER; note = 2'-O-methyluridine-3'-phosphate
  modified_base 10: mod_base = OTHER; note = 2'-O-methyluridine-3'-phosphate
  modified_base 11: mod_base = OTHER; note = 2'-O-methylcytidine-3'-phosphate
  modified_base 12: mod_base = OTHER; note = 2'-O-methyluridine-3'-phosphate
  modified_base 13: mod_base = OTHER; note = 2'-O-methyluridine-3'-phosphate
  modified_base 14: mod_base = OTHER; note = 2'-deoxy-2'-fluoroguanosine-3'-phosphate
  modified_base 15: mod_base = OTHER; note = 2'-O-methyluridine-3'-phosphate
  modified_base 16: mod_base = OTHER; note = 2'-deoxy-2'-fluoroadenosine-3'-phosphate
  modified_base 17: mod_base = OTHER; note = 2'-O-methyladenosine-3'-phosphate
  modified_base 18: mod_base = OTHER; note = 2'-O-methyluridine-3'-phosphate
  modified_base 19: mod_base = OTHER; note = 2'-O-methylcytidine-3'-phosphate
  modified_base 20: mod_base = OTHER; note = 2'-O-methyluridine-3'-phosphate
  modified_base 21: mod_base = OTHER; note = 2'-O-methyluridine-3'-phosphorothioate
  modified_base 22: mod_base = OTHER; note = 2'-O-methylguanosine-3'-phosphorothioate
  modified_base 23: mod_base = OTHER; note = 2'-O-methyluridine
  misc_feature 1..4: note = RNA
  misc_feature 6..23: note = RNA
  misc_feature 5: note = DNA
taagccgtttcttgtaatcttgt

SEQ ID NO: 1352 - DNA, 23 bp, synthetic construct
  source 1..23: mol_type = other DNA
  modified_base 1: mod_base = OTHER; note = 2'-O-methyluridine-3'-phosphate 5'-(E)-Vinylphosphonate
  modified_base 2: mod_base = OTHER; note = 2'-deoxy-2'-fluorouridine-3'-phosphate
  modified_base 3: mod_base = OTHER; note = 2'-O-methylguanosine-3'-phosphate
  modified_base 4: mod_base = OTHER; note = 2'-O-methyladenosine-3'-phosphate
  modified_base 6: mod_base = OTHER; note = 2'-O-methyladenosine-3'-phosphate
  modified_base 7: mod_base = OTHER; note = guanosine-2'-phosphate
  modified_base 8: mod_base = OTHER; note = 2'-O-methylcytidine-3'-phosphate
  modified_base 9: mod_base = OTHER; note = 2'-O-methylcytidine-3'-phosphate
  modified_base 10: mod_base = OTHER; note = 2'-O-methylguanosine-3'-phosphate
  modified_base 11: mod_base = OTHER; note = 2'-O-methyluridine-3'-phosphate
  modified_base 12: mod_base = OTHER; note = 2'-O-methyluridine-3'-phosphate
  modified_base 13: mod_base = OTHER; note = 2'-O-methyluridine-3'-phosphate
  modified_base 14: mod_base = OTHER; note = 2'-deoxy-2'-fluorocytidine-3'-phosphate
  modified_base 15: mod_base = OTHER; note = 2'-O-methyluridine-3'-phosphate
  modified_base 16: mod_base = OTHER; note = 2'-deoxy-2'-fluorouridine-3'-phosphate
  modified_base 17: mod_base = OTHER; note = 2'-O-methylguanosine-3'-phosphate
  modified_base 18: mod_base = OTHER; note = 2'-O-methyluridine-3'-phosphate
  modified_base 19: mod_base = OTHER; note = 2'-O-methyladenosine-3'-phosphate
  modified_base 20: mod_base = OTHER; note = 2'-O-methyladenosine-3'-phosphate
  modified_base 21: mod_base = OTHER; note = 2'-O-methyluridine-3'-phosphorothioate
  modified_base 22: mod_base = OTHER; note = 2'-O-methylcytidine-3'-phosphorothioate
  modified_base 23: mod_base = OTHER; note = 2'-O-methyluridine
  misc_feature 1..4: note = RNA
  misc_feature 6..23: note = RNA
  misc_feature 5: note = DNA
ttgaaagccgtttcttgtaatct

SEQ ID NO: 1353 - DNA, 23 bp, synthetic construct
  source 1..23: mol_type = other DNA
  modified_base 1: mod_base = OTHER; note = 2'-O-methyluridine-3'-phosphate 5'-(E)-Vinylphosphonate
  modified_base 2: mod_base = OTHER; note = 2'-deoxy-2'-fluoroguanosine-3'-phosphate
  modified_base 3: mod_base = OTHER; note = 2'-O-methylguanosine-3'-phosphate
  modified_base 4: mod_base = OTHER; note = 2'-O-methyluridine-3'-phosphate
  modified_base 6: mod_base = OTHER; note = 2'-O-methyladenosine-3'-phosphate
  modified_base 7: mod_base = OTHER; note = guanosine-2'-phosphate
  modified_base 8: mod_base = OTHER; note = 2'-O-methylcytidine-3'-phosphate
  modified_base 9: mod_base = OTHER; note = 2'-O-methyluridine-3'-phosphate
  modified_base 10: mod_base = OTHER; note = 2'-O-methylcytidine-3'-phosphate
  modified_base 11: mod_base = OTHER; note = 2'-O-methyladenosine-3'-phosphate
  modified_base 12: mod_base = OTHER; note = 2'-O-methyladenosine-3'-phosphate
  modified_base 13: mod_base = OTHER; note = 2'-O-methylcytidine-3'-phosphate
  modified_base 14: mod_base = OTHER; note = 2'-deoxy-2'-fluorouridine-3'-phosphate
  modified_base 15: mod_base = OTHER; note = 2'-O-methylguanosine-3'-phosphate
  modified_base 16: mod_base = OTHER; note = 2'-deoxy-2'-fluoroadenosine-3'-phosphate
  modified_base 17: mod_base = OTHER; note = 2'-O-methyladenosine-3'-phosphate
  modified_base 18: mod_base = OTHER; note = 2'-O-methyladenosine-3'-phosphate
  modified_base 19: mod_base = OTHER; note = 2'-O-methylguanosine-3'-phosphate
  modified_base 20: mod_base = OTHER; note = 2'-O-methylcytidine-3'-phosphate
  modified_base 21: mod_base = OTHER; note = 2'-O-methylcytidine-3'-phosphorothioate
  modified_base 22: mod_base = OTHER; note = 2'-O-methylguanosine-3'-phosphorothioate
  modified_base 23: mod_base = OTHER; note = 2'-O-methyluridine
  misc_feature 1..4: note = RNA
  misc_feature 6..23: note = RNA
  misc_feature 5: note = DNA
tggtcagctcaactgaaagccgt

SEQ ID NO: 1354 - DNA, 23 bp, synthetic construct
  source 1..23: mol_type = other DNA
  modified_base 1: mod_base = OTHER; note = 2'-O-methyluridine-3'-phosphate 5'-(E)-Vinylphosphonate
  modified_base 2: mod_base = OTHER; note = 2'-deoxy-2'-fluoroadenosine-3'-phosphate
  modified_base 3: mod_base = OTHER; note = 2'-O-methylguanosine-3'-phosphate
  modified_base 4: mod_base = OTHER; note = 2'-O-methyladenosine-3'-phosphate
  modified_base 6: mod_base = OTHER; note = 2'-O-methyladenosine-3'-phosphate
  modified_base 7: mod_base = OTHER; note = guanosine-2'-phosphate
  modified_base 8: mod_base = OTHER; note = 2'-O-methyladenosine-3'-phosphate
  modified_base 9: mod_base = OTHER; note = 2'-O-methylguanosine-3'-phosphate
  modified_base 10: mod_base = OTHER; note = 2'-O-methylcytidine-3'-phosphate
  modified_base 11: mod_base = OTHER; note = 2'-O-methyluridine-3'-phosphate
  modified_base 12: mod_base = OTHER; note = 2'-O-methylguanosine-3'-phosphate
  modified_base 13: mod_base = OTHER; note = 2'-O-methylguanosine-3'-phosphate
  modified_base 14: mod_base = OTHER; note = 2'-deoxy-2'-fluorouridine-3'-phosphate
  modified_base 15: mod_base = OTHER; note = 2'-O-methylcytidine-3'-phosphate
  modified_base 16: mod_base = OTHER; note = 2'-deoxy-2'-fluoroadenosine-3'-phosphate
  modified_base 17: mod_base = OTHER; note = 2'-O-methylguanosine-3'-phosphate
  modified_base 18: mod_base = OTHER; note = 2'-O-methylcytidine-3'-phosphate
  modified_base 19: mod_base = OTHER; note = 2'-O-methyluridine-3'-phosphate
  modified_base 20: mod_base = OTHER; note = 2'-O-methylcytidine-3'-phosphate
  modified_base 21: mod_base = OTHER; note = 2'-O-methyladenosine-3'-phosphorothioate
  modified_base 22: mod_base = OTHER; note = 2'-O-methyladenosine-3'-phosphorothioate
  modified_base 23: mod_base = OTHER; note = 2'-O-methylcytidine
  misc_feature 1..4: note = RNA
  misc_feature 6..23: note = RNA
  misc_feature 5: note = DNA
tagagagagctggtcagctcaac

SEQ ID NO: 1355 - DNA, 23 bp, synthetic construct
  source 1..23: mol_type = other DNA
  modified_base 1: mod_base = OTHER; note = 2'-O-methyluridine-3'-phosphate 5'-(E)-Vinylphosphonate
  modified_base 2: mod_base = OTHER; note = 2'-deoxy-2'-fluorouridine-3'-phosphate
  modified_base 3: mod_base = OTHER; note = 2'-O-methylcytidine-3'-phosphate
  modified_base 4: mod_base = OTHER; note = 2'-O-methyladenosine-3'-phosphate
  modified_base 6: mod_base = OTHER; note = 2'-O-methyluridine-3'-phosphate
  modified_base 7: mod_base = OTHER; note = cytidine-2'-phosphate
  modified_base 8: mod_base = OTHER; note = 2'-O-methylcytidine-3'-phosphate
  modified_base 9: mod_base = OTHER; note = 2'-O-methyladenosine-3'-phosphate
  modified_base 10: mod_base = OTHER; note = 2'-O-methyladenosine-3'-phosphate
  modified_base 11: mod_base = OTHER; note = 2'-O-methylguanosine-3'-phosphate
  modified_base 12: mod_base = OTHER; note = 2'-O-methylcytidine-3'-phosphate
  modified_base 13: mod_base = OTHER; note = 2'-O-methylcytidine-3'-phosphate
  modified_base 14: mod_base = OTHER; note = 2'-deoxy-2'-fluoroadenosine-3'-phosphate
  modified_base 15: mod_base = OTHER; note = 2'-O-methyluridine-3'-phosphate
  modified_base 16: mod_base = OTHER; note = 2'-deoxy-2'-fluorouridine-3'-phosphate
  modified_base 17: mod_base = OTHER; note = 2'-O-methylguanosine-3'-phosphate
  modified_base 18: mod_base = OTHER; note = 2'-O-methylguanosine-3'-phosphate
  modified_base 19: mod_base = OTHER; note = 2'-O-methylcytidine-3'-phosphate
  modified_base 20: mod_base = OTHER; note = 2'-O-methyluridine-3'-phosphate
  modified_base 21: mod_base = OTHER; note = 2'-O-methylcytidine-3'-phosphorothioate
  modified_base 22: mod_base = OTHER; note = 2'-O-methyluridine-3'-phosphorothioate
  modified_base 23: mod_base = OTHER; note = 2'-O-methylguanosine
  misc_feature 1..4: note = RNA
  misc_feature 6..23: note = RNA
  misc_feature 5: note = DNA
ttcattccaagccattggctctg

SEQ ID NO: 1356 - DNA, 23 bp, synthetic construct
  source 1..23: mol_type = other DNA
  modified_base 1: mod_base = OTHER; note = 2'-O-methyluridine-3'-phosphate 5'-(E)-Vinylphosphonate
  modified_base 2: mod_base = OTHER; note = 2'-deoxy-2'-fluoroadenosine-3'-phosphate
  modified_base 3: mod_base = OTHER; note = 2'-O-methyladenosine-3'-phosphate
  modified_base 4: mod_base = OTHER; note = 2'-O-methyluridine-3'-phosphate
  modified_base 6: mod_base = OTHER; note = 2'-O-methyluridine-3'-phosphate
  modified_base 7: mod_base = OTHER; note = cytidine-2'-phosphate
  modified_base 8: mod_base = OTHER; note = 2'-O-methyladenosine-3'-phosphate
  modified_base 9: mod_base = OTHER; note = 2'-O-methyladenosine-3'-phosphate
  modified_base 10: mod_base = OTHER; note = 2'-O-methylguanosine-3'-phosphate
  modified_base 11: mod_base = OTHER; note = 2'-O-methyluridine-3'-phosphate
  modified_base 12: mod_base = OTHER; note = 2'-O-methylcytidine-3'-phosphate
  modified_base 13: mod_base = OTHER; note = 2'-O-methylcytidine-3'-phosphate
  modified_base 14: mod_base = OTHER; note = 2'-deoxy-2'-fluoroadenosine-3'-phosphate
  modified_base 15: mod_base = OTHER; note = 2'-O-methyladenosine-3'-phosphate
  modified_base 16: mod_base = OTHER; note = 2'-deoxy-2'-fluoroguanosine-3'-phosphate
  modified_base 17: mod_base = OTHER; note = 2'-O-methyladenosine-3'-phosphate
  modified_base 18: mod_base = OTHER; note = 2'-O-methyluridine-3'-phosphate
  modified_base 19: mod_base = OTHER; note = 2'-O-methylcytidine-3'-phosphate
  modified_base 20: mod_base = OTHER; note = 2'-O-methyladenosine-3'-phosphate
  modified_base 21: mod_base = OTHER; note = 2'-O-methylguanosine-3'-phosphorothioate
  modified_base 22: mod_base = OTHER; note = 2'-O-methylcytidine-3'-phosphorothioate
  modified_base 23: mod_base = OTHER; note = 2'-O-methyladenosine
  misc_feature 1..4: note = RNA
  misc_feature 6..23: note = RNA
  misc_feature 5: note = DNA
taatatcaagtccaagatcagca

SEQ ID NO: 1357 - DNA, 23 bp, synthetic construct
  source 1..23: mol_type = other DNA
  modified_base 1: mod_base = OTHER; note = 2'-O-methyluridine-3'-phosphate 5'-(E)-Vinylphosphonate
  modified_base 2: mod_base = OTHER; note = 2'-deoxy-2'-fluorouridine-3'-phosphate
  modified_base 3: mod_base = OTHER; note = 2'-O-methyladenosine-3'-phosphate
  modified_base 4: mod_base = OTHER; note = 2'-O-methylcytidine-3'-phosphate
  modified_base 6: mod_base = OTHER; note = 2'-O-methylguanosine-3'-phosphate
  modified_base 7: mod_base = OTHER; note = guanosine-2'-phosphate
  modified_base 8: mod_base = OTHER; note = 2'-O-methyluridine-3'-phosphate
  modified_base 9: mod_base = OTHER; note = 2'-O-methylcytidine-3'-phosphate
  modified_base 10: mod_base = OTHER; note = 2'-O-methyladenosine-3'-phosphate
  modified_base 11: mod_base = OTHER; note = 2'-O-methylguanosine-3'-phosphate
  modified_base 12: mod_base = OTHER; note = 2'-O-methyluridine-3'-phosphate
  modified_base 13: mod_base = OTHER; note = 2'-O-methyladenosine-3'-phosphate
  modified_base 14: mod_base = OTHER; note = 2'-deoxy-2'-fluorouridine-3'-phosphate
  modified_base 15: mod_base = OTHER; note = 2'-O-methylcytidine-3'-phosphate
  modified_base 16: mod_base = OTHER; note = 2'-deoxy-2'-fluoroadenosine-3'-phosphate
  modified_base 17: mod_base = OTHER; note = 2'-O-methyladenosine-3'-phosphate
  modified_base 18: mod_base = OTHER; note = 2'-O-methyladenosine-3'-phosphate
  modified_base 19: mod_base = OTHER; note = 2'-O-methylcytidine-3'-phosphate
  modified_base 20: mod_base = OTHER; note = 2'-O-methylcytidine-3'-phosphate
  modified_base 21: mod_base = OTHER; note = 2'-O-methyladenosine-3'-phosphorothioate
  modified_base 22: mod_base = OTHER; note = 2'-O-methylguanosine-3'-phosphorothioate
  modified_base 23: mod_base = OTHER; note = 2'-O-methylguanosine
  misc_feature 1..4: note = RNA
  misc_feature 6..23: note = RNA
  misc_feature 5: note = DNA
ttacaggtcagtatcaaaccagg

SEQ ID NO: 1358 - DNA, 23 bp, synthetic construct
  source 1..23: mol_type = other DNA
  modified_base 1: mod_base = OTHER; note = 2'-O-methyluridine-3'-phosphate 5'-(E)-Vinylphosphonate
  modified_base 2: mod_base = OTHER; note = 2'-deoxy-2'-fluoroadenosine-3'-phosphate
  modified_base 3: mod_base = OTHER; note = 2'-O-methyluridine-3'-phosphate
  modified_base 4: mod_base = OTHER; note = 2'-O-methyluridine-3'-phosphate
  modified_base 6: mod_base = OTHER; note = 2'-O-methyladenosine-3'-phosphate
  modified_base 7: mod_base = OTHER; note = cytidine-2'-phosphate
  modified_base 8: mod_base = OTHER; note = 2'-O-methyladenosine-3'-phosphate
  modified_base 9: mod_base = OTHER; note = 2'-O-methylguanosine-3'-phosphate
  modified_base 10: mod_base = OTHER; note = 2'-O-methylguanosine-3'-phosphate
  modified_base 11: mod_base = OTHER; note = 2'-O-methyluridine-3'-phosphate
  modified_base 12: mod_base = OTHER; note = 2'-O-methylcytidine-3'-phosphate
  modified_base 13: mod_base = OTHER; note = 2'-O-methyladenosine-3'-phosphate
  modified_base 14: mod_base = OTHER; note = 2'-deoxy-2'-fluoroguanosine-3'-phosphate
  modified_base 15: mod_base = OTHER; note = 2'-O-methyluridine-3'-phosphate
  modified_base 16: mod_base = OTHER; note = 2'-deoxy-2'-fluoroadenosine-3'-phosphate
  modified_base 17: mod_base = OTHER; note = 2'-O-methyluridine-3'-phosphate
  modified_base 18: mod_base = OTHER; note = 2'-O-methylcytidine-3'-phosphate
  modified_base 19: mod_base = OTHER; note = 2'-O-methyladenosine-3'-phosphate
  modified_base 20: mod_base = OTHER; note = 2'-O-methyladenosine-3'-phosphate
  modified_base 21: mod_base = OTHER; note = 2'-O-methyladenosine-3'-phosphorothioate
  modified_base 22: mod_base = OTHER; note = 2'-O-methylcytidine-3'-phosphorothioate
  modified_base 23: mod_base = OTHER; note = 2'-O-methylcytidine
  misc_feature 1..4: note = RNA
  misc_feature 6..23: note = RNA
  misc_feature 5: note = DNA
tatttacaggtcagtatcaaacc

SEQ ID NO: 1359 - DNA, 23 bp, synthetic construct
  source 1..23: mol_type = other DNA
  modified_base 1: mod_base = OTHER; note = 2'-O-methyluridine-3'-phosphate 5'-(E)-Vinylphosphonate
  modified_base 2: mod_base = OTHER; note = 2'-deoxy-2'-fluorouridine-3'-phosphate
  modified_base 3: mod_base = OTHER; note = 2'-O-methylguanosine-3'-phosphate
  modified_base 4: mod_base = OTHER; note = 2'-O-methylguanosine-3'-phosphate
  modified_base 6: mod_base = OTHER; note = 2'-O-methyladenosine-3'-phosphate
  modified_base 7: mod_base = OTHER; note = guanosine-2'-phosphate
  modified_base 8: mod_base = OTHER; note = 2'-O-methyladenosine-3'-phosphate
  modified_base 9: mod_base = OTHER; note = 2'-O-methyluridine-3'-phosphate
  modified_base 10: mod_base = OTHER; note = 2'-O-methyluridine-3'-phosphate
  modified_base 11: mod_base = OTHER; note = 2'-O-methyluridine-3'-phosphate
  modified_base 12: mod_base = OTHER; note = 2'-O-methyladenosine-3'-phosphate
  modified_base 13: mod_base = OTHER; note = 2'-O-methylcytidine-3'-phosphate
  modified_base 14: mod_base = OTHER; note = 2'-deoxy-2'-fluoroadenosine-3'-phosphate
  modified_base 15: mod_base = OTHER; note = 2'-O-methyladenosine-3'-phosphate
  modified_base 16: mod_base = OTHER; note = 2'-deoxy-2'-fluoroadenosine-3'-phosphate
  modified_base 17: mod_base = OTHER; note = 2'-O-methyluridine-3'-phosphate
  modified_base 18: mod_base = OTHER; note = 2'-O-methyladenosine-3'-phosphate
  modified_base 19: mod_base = OTHER; note = 2'-O-methylguanosine-3'-phosphate
  modified_base 20: mod_base = OTHER; note = 2'-O-methylcytidine-3'-phosphate
  modified_base 21: mod_base = OTHER; note = 2'-O-methylcytidine-3'-phosphorothioate
  modified_base 22: mod_base = OTHER; note = 2'-O-methyluridine-3'-phosphorothioate
  modified_base 23: mod_base = OTHER; note = 2'-O-methyladenosine
  misc_feature 1..4: note = RNA
  misc_feature 6..23: note = RNA
  misc_feature 5: note = DNA
ttggcagatttacaaatagccta

SEQ ID NO: 1360 - DNA, 23 bp, synthetic construct
  source 1..23: mol_type = other DNA
  modified_base 1: mod_base = OTHER; note = 2'-O-methyluridine-3'-phosphate 5'-(E)-Vinylphosphonate
  modified_base 2: mod_base = OTHER; note = 2'-deoxy-2'-fluoroguanosine-3'-phosphate
  modified_base 3: mod_base = OTHER; note = 2'-O-methyladenosine-3'-phosphate
  modified_base 4: mod_base = OTHER; note = 2'-O-methyluridine-3'-phosphate
  modified_base 6: mod_base = OTHER; note = 2'-O-methyladenosine-3'-phosphate
  modified_base 7: mod_base = OTHER; note = cytidine-2'-phosphate
  modified_base 8: mod_base = OTHER; note = 2'-O-methyladenosine-3'-phosphate
  modified_base 9: mod_base = OTHER; note = 2'-O-methyluridine-3'-phosphate
  modified_base 10: mod_base = OTHER; note = 2'-O-methyladenosine-3'-phosphate
  modified_base 11: mod_base = OTHER; note = 2'-O-methyladenosine-3'-phosphate
  modified_base 12: mod_base = OTHER; note = 2'-O-methylcytidine-3'-phosphate
  modified_base 13: mod_base = OTHER; note = 2'-O-methyladenosine-3'-phosphate
  modified_base 14: mod_base = OTHER; note = 2'-deoxy-2'-fluoroadenosine-3'-phosphate
  modified_base 15: mod_base = OTHER; note = 2'-O-methylcytidine-3'-phosphate
  modified_base 16: mod_base = OTHER; note = 2'-deoxy-2'-fluorocytidine-3'-phosphate
  modified_base 17: mod_base = OTHER; note = 2'-O-methyladenosine-3'-phosphate
  modified_base 18: mod_base = OTHER; note = 2'-O-methylguanosine-3'-phosphate
  modified_base 19: mod_base = OTHER; note = 2'-O-methyladenosine-3'-phosphate
  modified_base 20: mod_base = OTHER; note = 2'-O-methyladenosine-3'-phosphate
  modified_base 21: mod_base = OTHER; note = 2'-O-methyladenosine-3'-phosphorothioate
  modified_base 22: mod_base = OTHER; note = 2'-O-methyluridine-3'-phosphorothioate
  modified_base 23: mod_base = OTHER; note = 2'-O-methylcytidine
  misc_feature 1..4: note = RNA
  misc_feature 6..23: note = RNA
  misc_feature 5: note = DNA
tgatcacataacaaccagaaatc

SEQ ID NO: 1361 - DNA, 23 bp, synthetic construct
  source 1..23: mol_type = other DNA
  modified_base 1: mod_base = OTHER; note = 2'-O-methyluridine-3'-phosphate 5'-(E)-Vinylphosphonate
  modified_base 2: mod_base = OTHER; note = 2'-deoxy-2'-fluoroadenosine-3'-phosphate
  modified_base 3: mod_base = OTHER; note = 2'-O-methyladenosine-3'-phosphate
  modified_base 4: mod_base = OTHER; note = 2'-O-methyluridine-3'-phosphate
  modified_base 6: mod_base = OTHER; note = 2'-O-methyladenosine-3'-phosphate
  modified_base 7: mod_base = OTHER; note = cytidine-2'-phosphate
  modified_base 8: mod_base = OTHER; note = 2'-O-methyluridine-3'-phosphate
  modified_base 9: mod_base = OTHER; note = 2'-O-methyluridine-3'-phosphate
  modified_base 10: mod_base = OTHER; note = 2'-O-methylcytidine-3'-phosphate
  modified_base 11: mod_base = OTHER; note = 2'-O-methylcytidine-3'-phosphate
  modified_base 12: mod_base = OTHER; note = 2'-O-methyladenosine-3'-phosphate
  modified_base 13: mod_base = OTHER; note = 2'-O-methylcytidine-3'-phosphate
  modified_base 14: mod_base = OTHER; note = 2'-deoxy-2'-fluoroadenosine-3'-phosphate
  modified_base 15: mod_base = OTHER; note = 2'-O-methylcytidine-3'-phosphate
  modified_base 16: mod_base = OTHER; note = 2'-deoxy-2'-fluoroadenosine-3'-phosphate
  modified_base 17: mod_base = OTHER; note = 2'-O-methyluridine-3'-phosphate
  modified_base 18: mod_base = OTHER; note = 2'-O-methylguanosine-3'-phosphate
  modified_base 19: mod_base = OTHER; note = 2'-O-methyladenosine-3'-phosphate
  modified_base 20: mod_base = OTHER; note = 2'-O-methyluridine-3'-phosphate
  modified_base 21: mod_base = OTHER; note = 2'-O-methylcytidine-3'-phosphorothioate
  modified_base 22: mod_base = OTHER; note = 2'-O-methyladenosine-3'-phosphorothioate
  modified_base 23: mod_base = OTHER; note = 2'-O-methylcytidine
  misc_feature 1..4: note = RNA
  misc_feature 6..23: note = RNA
  misc_feature 5: note = DNA
taataacttccacacatgatcac

SEQ ID NO: 1362 - DNA, 23 bp, synthetic construct
  source 1..23: mol_type = other DNA
  modified_base 1: mod_base = OTHER; note = 2'-O-methyluridine-3'-phosphate 5'-(E)-Vinylphosphonate
  modified_base 2: mod_base = OTHER; note = 2'-deoxy-2'-fluorouridine-3'-phosphate
  modified_base 3: mod_base = OTHER; note = 2'-O-methylguanosine-3'-phosphate
  modified_base 4: mod_base = OTHER; note = 2'-O-methyluridine-3'-phosphate
  modified_base 6: mod_base = OTHER; note = 2'-O-methyladenosine-3'-phosphate
  modified_base 7: mod_base = OTHER; note = cytidine-2'-phosphate
  modified_base 8: mod_base = OTHER; note = 2'-O-methyluridine-3'-phosphate
  modified_base 9: mod_base = OTHER; note = 2'-O-methylcytidine-3'-phosphate
  modified_base 10: mod_base = OTHER; note = 2'-O-methyladenosine-3'-phosphate
  modified_base 11: mod_base = OTHER; note = 2'-O-methyluridine-3'-phosphate
  modified_base 12: mod_base = OTHER; note = 2'-O-methyluridine-3'-phosphate
  modified_base 13: mod_base = OTHER; note = 2'-O-methyluridine-3'-phosphate
  modified_base 14: mod_base = OTHER; note = 2'-deoxy-2'-fluoroguanosine-3'-phosphate
  modified_base 15: mod_base = OTHER; note = 2'-O-methyladenosine-3'-phosphate
  modified_base 16: mod_base = OTHER; note = 2'-deoxy-2'-fluoroguanosine-3'-phosphate
  modified_base 17: mod_base = OTHER; note = 2'-O-methyluridine-3'-phosphate
  modified_base 18: mod_base = OTHER; note = 2'-O-methyladenosine-3'-phosphate
  modified_base 19: mod_base = OTHER; note = 2'-O-methyluridine-3'-phosphate
  modified_base 20: mod_base = OTHER; note = 2'-O-methyluridine-3'-phosphate
  modified_base 21: mod_base = OTHER; note = 2'-O-methyladenosine-3'-phosphorothioate
  modified_base 22: mod_base = OTHER; note = 2'-O-methyladenosine-3'-phosphorothioate
  modified_base 23: mod_base = OTHER; note = 2'-O-methylguanosine
  misc_feature 1..4: note = RNA
  misc_feature 6..23: note = RNA
  misc_feature 5: note = DNA
ttgttactcatttgagtattaag

SEQ ID NO: 1363 - DNA, 23 bp, synthetic construct
  source 1..23: mol_type = other DNA
  modified_base 1: mod_base = OTHER; note = 2'-O-methyluridine-3'-phosphate 5'-(E)-Vinylphosphonate
  modified_base 2: mod_base = OTHER; note = 2'-deoxy-2'-fluoroadenosine-3'-phosphate
  modified_base 3: mod_base = OTHER; note = 2'-O-methylcytidine-3'-phosphate
  modified_base 4: mod_base = OTHER; note = 2'-O-methyladenosine-3'-phosphate
  modified_base 6: mod_base = OTHER; note = 2'-O-methyluridine-3'-phosphate
  modified_base 7: mod_base = OTHER; note = guanosine-2'-phosphate
  modified_base 8: mod_base = OTHER; note = 2'-O-methylcytidine-3'-phosphate
  modified_base 9: mod_base = OTHER; note = 2'-O-methyladenosine-3'-phosphate
  modified_base 10: mod_base = OTHER; note = 2'-O-methyladenosine-3'-phosphate
  modified_base 11: mod_base = OTHER; note = 2'-O-methylguanosine-3'-phosphate
  modified_base 12: mod_base = OTHER; note = 2'-O-methyluridine-3'-phosphate
  modified_base 13: mod_base = OTHER; note = 2'-O-methyluridine-3'-phosphate
  modified_base 14: mod_base = OTHER; note = 2'-deoxy-2'-fluorocytidine-3'-phosphate
  modified_base 15: mod_base = OTHER; note = 2'-O-methyladenosine-3'-phosphate
  modified_base 16: mod_base = OTHER; note = 2'-deoxy-2'-fluoroguanosine-3'-phosphate
  modified_base 17: mod_base = OTHER; note = 2'-O-methyladenosine-3'-phosphate
  modified_base 18: mod_base = OTHER; note = 2'-O-methylcytidine-3'-phosphate
  modified_base 19: mod_base = OTHER; note = 2'-O-methyladenosine-3'-phosphate
  modified_base 20: mod_base = OTHER; note = 2'-O-methyladenosine-3'-phosphate
  modified_base 21: mod_base = OTHER; note = 2'-O-methyluridine-3'-phosphorothioate
  modified_base 22: mod_base = OTHER; note = 2'-O-methyladenosine-3'-phosphorothioate
  modified_base 23: mod_base = OTHER; note = 2'-O-methylcytidine
  misc_feature 1..4: note = RNA
  misc_feature 6..23: note = RNA
  misc_feature 5: note = DNA
tacaatgcaagttcagacaatac

SEQ ID NO: 1364 - DNA, 23 bp, synthetic construct
  source 1..23: mol_type = other DNA
  modified_base 1: mod_base = OTHER; note = 2'-O-methyluridine-3'-phosphate 5'-(E)-Vinylphosphonate
  modified_base 2: mod_base = OTHER; note = 2'-deoxy-2'-fluoroadenosine-3'-phosphate
  modified_base 3: mod_base = OTHER; note = 2'-O-methylguanosine-3'-phosphate
  modified_base 4: mod_base = OTHER; note = 2'-O-methyluridine-3'-phosphate
  modified_base 6: mod_base = OTHER; note = 2'-O-methyluridine-3'-phosphate
  modified_base 7: mod_base = OTHER; note = guanosine-2'-phosphate
  modified_base 8: mod_base = OTHER; note = 2'-O-methyluridine-3'-phosphate
  modified_base 9: mod_base = OTHER; note = 2'-O-methylcytidine-3'-phosphate
  modified_base 10: mod_base = OTHER; note = 2'-O-methyladenosine-3'-phosphate
  modified_base 11: mod_base = OTHER; note = 2'-O-methylguanosine-3'-phosphate
  modified_base 12: mod_base = OTHER; note = 2'-O-methylguanosine-3'-phosphate
  modified_base 13: mod_base = OTHER; note = 2'-O-methylcytidine-3'-phosphate
  modified_base 14: mod_base = OTHER; note = 2'-deoxy-2'-fluoroadenosine-3'-phosphate
  modified_base 15: mod_base = OTHER; note = 2'-O-methylcytidine-3'-phosphate
  modified_base 16: mod_base = OTHER; note = 2'-deoxy-2'-fluorouridine-3'-phosphate
  modified_base 17: mod_base = OTHER; note = 2'-O-methyluridine-3'-phosphate
  modified_base 18: mod_base = OTHER; note = 2'-O-methyluridine-3'-phosphate
  modified_base 19: mod_base = OTHER; note = 2'-O-methylcytidine-3'-phosphate
  modified_base 20: mod_base = OTHER; note = 2'-O-methyluridine-3'-phosphate
  modified_base 21: mod_base = OTHER; note = 2'-O-methylguanosine-3'-phosphorothioate
  modified_base 22: mod_base = OTHER; note = 2'-O-methyladenosine-3'-phosphorothioate
  modified_base 23: mod_base = OTHER; note = 2'-O-methylguanosine
  misc_feature 1..4: note = RNA
  misc_feature 6..23: note = RNA
  misc_feature 5: note = DNA
tagtgtgtcaggcactttctgag

SEQ ID NO: 1365 - DNA, 23 bp, synthetic construct
  source 1..23: mol_type = other DNA
  modified_base 1: mod_base = OTHER; note = 2'-O-methyluridine-3'-phosphate 5'-(E)-Vinylphosphonate
  modified_base 2: mod_base = OTHER; note = 2'-deoxy-2'-fluorouridine-3'-phosphate
  modified_base 3: mod_base = OTHER; note = 2'-O-methyluridine-3'-phosphate
  modified_base 4: mod_base = OTHER; note = 2'-O-methyladenosine-3'-phosphate
  modified_base 6: mod_base = OTHER; note = 2'-O-methyluridine-3'-phosphate
  modified_base 7: mod_base = OTHER; note = guanosine-2'-phosphate
  modified_base 8: mod_base = OTHER; note = 2'-O-methyluridine-3'-phosphate
  modified_base 9: mod_base = OTHER; note = 2'-O-methylguanosine-3'-phosphate
  modified_base 10: mod_base = OTHER; note = 2'-O-methyluridine-3'-phosphate
  modified_base 11: mod_base = OTHER; note = 2'-O-methylcytidine-3'-phosphate
  modified_base 12: mod_base = OTHER; note = 2'-O-methyladenosine-3'-phosphate
  modified_base 13: mod_base = OTHER; note = 2'-O-methylguanosine-3'-phosphate
  modified_base 14: mod_base = OTHER; note = 2'-deoxy-2'-fluoroguanosine-3'-phosphate
  modified_base 15: mod_base = OTHER; note = 2'-O-methylcytidine-3'-phosphate
  modified_base 16: mod_base = OTHER; note = 2'-deoxy-2'-fluoroadenosine-3'-phosphate
  modified_base 17: mod_base = OTHER; note = 2'-O-methylcytidine-3'-phosphate
  modified_base 18: mod_base = OTHER; note = 2'-O-methyluridine-3'-phosphate
  modified_base 19: mod_base = OTHER; note = 2'-O-methyluridine-3'-phosphate
  modified_base 20: mod_base = OTHER; note = 2'-O-methyluridine-3'-phosphate
  modified_base 21: mod_base = OTHER; note = 2'-O-methylcytidine-3'-phosphorothioate
  modified_base 22: mod_base = OTHER; note = 2'-O-methyluridine-3'-phosphorothioate
  modified_base 23: mod_base = OTHER; note = 2'-O-methylguanosine
  misc_feature 1..4: note = RNA
  misc_feature 6..23: note = RNA
  misc_feature 5: note = DNA
tttagtgtgtcaggcactttctg

SEQ ID NO: 1366 - DNA, 23 bp, synthetic construct
  source 1..23: mol_type = other DNA
  modified_base 1: mod_base = OTHER; note = 2'-O-methyluridine-3'-phosphate 5'-(E)-Vinylphosphonate
  modified_base 2: mod_base = OTHER; note = 2'-deoxy-2'-fluoroguanosine-3'-phosphate
  modified_base 3: mod_base = OTHER; note = 2'-O-methylcytidine-3'-phosphate
  modified_base 4: mod_base = OTHER; note = 2'-O-methyluridine-3'-phosphate
  modified_base 6: mod_base = OTHER; note = 2'-O-methylguanosine-3'-phosphate
  modified_base 7: mod_base = OTHER; note = guanosine-2'-phosphate
  modified_base 8: mod_base = OTHER; note = 2'-O-methyluridine-3'-phosphate
  modified_base 9: mod_base = OTHER; note = 2'-O-methyluridine-3'-phosphate
  modified_base 10: mod_base = OTHER; note = 2'-O-methyladenosine-3'-phosphate
  modified_base 11: mod_base = OTHER; note = 2'-O-methylguanosine-3'-phosphate
  modified_base 12: mod_base = OTHER; note = 2'-O-methyluridine-3'-phosphate
  modified_base 13: mod_base = OTHER; note = 2'-O-methylguanosine-3'-phosphate
  modified_base 14: mod_base = OTHER; note = 2'-deoxy-2'-fluorouridine-3'-phosphate
  modified_base 15: mod_base = OTHER; note = 2'-O-methylguanosine-3'-phosphate
  modified_base 16: mod_base = OTHER; note = 2'-deoxy-2'-fluorouridine-3'-phosphate
  modified_base 17: mod_base = OTHER; note = 2'-O-methylcytidine-3'-phosphate
  modified_base 18: mod_base = OTHER; note = 2'-O-methyladenosine-3'-phosphate
  modified_base 19: mod_base = OTHER; note = 2'-O-methylguanosine-3'-phosphate
  modified_base 20: mod_base = OTHER; note = 2'-O-methylguanosine-3'-phosphate
  modified_base 21: mod_base = OTHER; note = 2'-O-methylcytidine-3'-phosphorothioate
  modified_base 22: mod_base = OTHER; note = 2'-O-methyladenosine-3'-phosphorothioate
  modified_base 23: mod_base = OTHER; note = 2'-O-methylcytidine
  misc_feature 1..4: note = RNA
  misc_feature 6..23: note = RNA
  misc_feature 5: note = DNA
tgcttggttagtgtgtcaggcac

SEQ ID NO: 1367 - DNA, 23 bp, synthetic construct
  source 1..23: mol_type = other DNA
  modified_base 1: mod_base = OTHER; note = 2'-O-methyluridine-3'-phosphate 5'-(E)-Vinylphosphonate
  modified_base 2: mod_base = OTHER; note = 2'-deoxy-2'-fluoroguanosine-3'-phosphate
  modified_base 3: mod_base = OTHER; note = 2'-O-methyluridine-3'-phosphate
  modified_base 4: mod_base = OTHER; note = 2'-O-methyluridine-3'-phosphate
  modified_base 6: mod_base = OTHER; note = 2'-O-methyladenosine-3'-phosphate
  modified_base 7: mod_base = OTHER; note = cytidine-2'-phosphate
  modified_base 8: mod_base = OTHER; note = 2'-O-methyluridine-3'-phosphate
  modified_base 9: mod_base = OTHER; note = 2'-O-methyluridine-3'-phosphate
  modified_base 10: mod_base = OTHER; note = 2'-O-methylcytidine-3'-phosphate
  modified_base 11: mod_base = OTHER; note = 2'-O-methyladenosine-3'-phosphate
  modified_base 12: mod_base = OTHER; note = 2'-O-methyladenosine-3'-phosphate
  modified_base 13: mod_base = OTHER; note = 2'-O-methyluridine-3'-phosphate
  modified_base 14: mod_base = OTHER; note = 2'-deoxy-2'-fluorouridine-3'-phosphate
  modified_base 15: mod_base = OTHER; note = 2'-O-methylguanosine-3'-phosphate
  modified_base 16: mod_base = OTHER; note = 2'-deoxy-2'-fluorouridine-3'-phosphate
  modified_base 17: mod_base = OTHER; note = 2'-O-methyluridine-3'-phosphate
  modified_base 18: mod_base = OTHER; note = 2'-O-methylcytidine-3'-phosphate
  modified_base 19: mod_base = OTHER; note = 2'-O-methylcytidine-3'-phosphate
  modified_base 20: mod_base = OTHER; note = 2'-O-methylcytidine-3'-phosphate
  modified_base 21: mod_base = OTHER; note = 2'-O-methyladenosine-3'-phosphorothioate
  modified_base 22: mod_base = OTHER; note = 2'-O-methyluridine-3'-phosphorothioate
  modified_base 23: mod_base = OTHER; note = 2'-O-methyladenosine
  misc_feature 1..4: note = RNA
  misc_feature 6..23: note = RNA
  misc_feature 5: note = DNA
tgtttacttcaattgttcccata

SEQ ID NO: 1368 - DNA, 23 bp, synthetic construct
  source 1..23: mol_type = other DNA
  modified_base 1: mod_base = OTHER; note = 2'-O-methyluridine-3'-phosphate 5'-(E)-Vinylphosphonate
  modified_base 2: mod_base = OTHER; note = 2'-deoxy-2'-fluoroadenosine-3'-phosphate
  modified_base 3: mod_base = OTHER; note = 2'-O-methyladenosine-3'-phosphate
  modified_base 4: mod_base = OTHER; note = 2'-O-methyluridine-3'-phosphate
  modified_base 6: mod_base = OTHER; note = 2'-O-methylcytidine-3'-phosphate
  modified_base 7: mod_base = OTHER; note = cytidine-2'-phosphate
  modified_base 8: mod_base = OTHER; note = 2'-O-methyladenosine-3'-phosphate
  modified_base 9: mod_base = OTHER; note = 2'-O-methyluridine-3'-phosphate
  modified_base 10: mod_base = OTHER; note = 2'-O-methylcytidine-3'-phosphate
  modified_base 11: mod_base = OTHER; note = 2'-O-methyluridine-3'-phosphate
  modified_base 12: mod_base = OTHER; note = 2'-O-methyluridine-3'-phosphate
  modified_base 13: mod_base = OTHER; note = 2'-O-methylguanosine-3'-phosphate
  modified_base 14: mod_base = OTHER; note = 2'-deoxy-2'-fluorouridine-3'-phosphate
  modified_base 15: mod_base = OTHER; note = 2'-O-methylguanosine-3'-phosphate
  modified_base 16: mod_base = OTHER; note = 2'-deoxy-2'-fluoroadenosine-3'-phosphate
  modified_base 17: mod_base = OTHER; note = 2'-O-methyluridine-3'-phosphate
  modified_base 18: mod_base = OTHER; note = 2'-O-methylcytidine-3'-phosphate
  modified_base 19: mod_base = OTHER; note = 2'-O-methylcytidine-3'-phosphate
  modified_base 20: mod_base = OTHER; note = 2'-O-methyladenosine-3'-phosphate
  modified_base 21: mod_base = OTHER; note = 2'-O-methyluridine-3'-phosphorothioate
  modified_base 22: mod_base = OTHER; note = 2'-O-methyluridine-3'-phosphorothioate
  modified_base 23: mod_base = OTHER; note = 2'-O-methylcytidine
  misc_feature 1..4: note = RNA
  misc_feature 6..23: note = RNA
  misc_feature 5: note = DNA
taattccatcttgtgatccattc

SEQ ID NO: 1369 - DNA, 23 bp, synthetic construct
  source 1..23: mol_type = other DNA
  modified_base 1: mod_base = OTHER; note = 2'-O-methyluridine-3'-phosphate 5'-(E)-Vinylphosphonate
  modified_base 2: mod_base = OTHER; note = 2'-deoxy-2'-fluorocytidine-3'-phosphate
  modified_base 3: mod_base = OTHER; note = 2'-O-methyladenosine-3'-phosphate
  modified_base 4: mod_base = OTHER; note = 2'-O-methyladenosine-3'-phosphate
  modified_base 6: mod_base = OTHER; note = 2'-O-methylguanosine-3'-phosphate
  modified_base 7: mod_base = OTHER; note = cytidine-2'-phosphate
  modified_base 8: mod_base = OTHER; note = 2'-O-methyluridine-3'-phosphate
  modified_base 9: mod_base = OTHER; note = 2'-O-methyladenosine-3'-phosphate
  modified_base 10: mod_base = OTHER; note = 2'-O-methylguanosine-3'-phosphate
  modified_base 11: mod_base = OTHER; note = 2'-O-methylguanosine-3'-phosphate
  modified_base 12: mod_base = OTHER; note = 2'-O-methylguanosine-3'-phosphate
  modified_base 13: mod_base = OTHER; note = 2'-O-methyluridine-3'-phosphate
  modified_base 14: mod_base = OTHER; note = 2'-deoxy-2'-fluorouridine-3'-phosphate
  modified_base 15: mod_base = OTHER; note = 2'-O-methyluridine-3'-phosphate
  modified_base 16: mod_base = OTHER; note = 2'-deoxy-2'-fluoroguanosine-3'-phosphate
  modified_base 17: mod_base = OTHER; note = 2'-O-methyladenosine-3'-phosphate
  modified_base 18: mod_base = OTHER; note = 2'-O-methyluridine-3'-phosphate
  modified_base 19: mod_base = OTHER; note = 2'-O-methyladenosine-3'-phosphate
  modified_base 20: mod_base = OTHER; note = 2'-O-methyladenosine-3'-phosphate
  modified_base 21: mod_base = OTHER; note = 2'-O-methyladenosine-3'-phosphorothioate
  modified_base 22: mod_base = OTHER; note = 2'-O-methyluridine-3'-phosphorothioate
  modified_base 23: mod_base = OTHER; note = 2'-O-methyluridine
  misc_feature 1..4: note = RNA
  misc_feature 6..23: note = RNA
  misc_feature 5: note = DNA
tcaaggctagggtttgataaatt

SEQ ID NO: 1370 - DNA, 23 bp, synthetic construct
  source 1..23: mol_type = other DNA
  modified_base 1: mod_base = OTHER; note = 2'-O-methyluridine-3'-phosphate 5'-(E)-Vinylphosphonate
  modified_base 2: mod_base = OTHER; note = 2'-deoxy-2'-fluoroadenosine-3'-phosphate
  modified_base 3: mod_base = OTHER; note = 2'-O-methylguanosine-3'-phosphate
  modified_base 4: mod_base = OTHER; note = 2'-O-methyluridine-3'-phosphate
  modified_base 6: mod_base = OTHER; note = 2'-O-methyladenosine-3'-phosphate
  modified_base 7: mod_base = OTHER; note = guanosine-2'-phosphate
  modified_base 8: mod_base = OTHER; note = 2'-O-methyluridine-3'-phosphate
  modified_base 9: mod_base = OTHER; note = 2'-O-methyladenosine-3'-phosphate
  modified_base 10: mod_base = OTHER; note = 2'-O-methylcytidine-3'-phosphate
  modified_base 11: mod_base = OTHER; note = 2'-O-methylcytidine-3'-phosphate
  modified_base 12: mod_base = OTHER; note = 2'-O-methyladenosine-3'-phosphate
  modified_base 13: mod_base = OTHER; note = 2'-O-methyluridine-3'-phosphate
  modified_base 14: mod_base = OTHER; note = 2'-deoxy-2'-fluorouridine-3'-phosphate
  modified_base 15: mod_base = OTHER; note = 2'-O-methyladenosine-3'-phosphate
  modified_base 16: mod_base = OTHER; note = 2'-deoxy-2'-fluorocytidine-3'-phosphate
  modified_base 17: mod_base = OTHER; note = 2'-O-methyladenosine-3'-phosphate
  modified_base 18: mod_base = OTHER; note = 2'-O-methylguanosine-3'-phosphate
  modified_base 19: mod_base = OTHER; note = 2'-O-methyladenosine-3'-phosphate
  modified_base 20: mod_base = OTHER; note = 2'-O-methyluridine-3'-phosphate
  modified_base 21: mod_base = OTHER; note = 2'-O-methyladenosine-3'-phosphorothioate
  modified_base 22: mod_base = OTHER; note = 2'-O-methyluridine-3'-phosphorothioate
  modified_base 23: mod_base = OTHER; note = 2'-O-methyluridine
  misc_feature 1..4: note = RNA
  misc_feature 6..23: note = RNA
  misc_feature 5: note = DNA
tagtcagtaccattacagatatt

SEQ ID NO: 1371 - DNA, 23 bp, synthetic construct
  source 1..23: mol_type = other DNA
  modified_base 1: mod_base = OTHER; note = 2'-O-methyluridine-3'-phosphate 5'-(E)-Vinylphosphonate
  modified_base 2: mod_base = OTHER; note = 2'-deoxy-2'-fluoroadenosine-3'-phosphate
  modified_base 3: mod_base = OTHER; note = 2'-O-methylguanosine-3'-phosphate
  modified_base 4: mod_base = OTHER; note = 2'-O-methylcytidine-3'-phosphate
  modified_base 6: mod_base = OTHER; note = 2'-O-methyladenosine-3'-phosphate
  modified_base 7: mod_base = OTHER; note = cytidine-2'-phosphate
  modified_base 8: mod_base = OTHER; note = 2'-O-methyluridine-3'-phosphate
  modified_base 9: mod_base = OTHER; note = 2'-O-methyluridine-3'-phosphate
  modified_base 10: mod_base = OTHER; note = 2'-O-methylcytidine-3'-phosphate
  modified_base 11: mod_base = OTHER; note = 2'-O-methyladenosine-3'-phosphate
  modified_base 12: mod_base = OTHER; note = 2'-O-methyladenosine-3'-phosphate
  modified_base 13: mod_base = OTHER; note = 2'-O-methyladenosine-3'-phosphate
  modified_base 14: mod_base = OTHER; note = 2'-deoxy-2'-fluoroguanosine-3'-phosphate
  modified_base 15: mod_base = OTHER; note = 2'-O-methylcytidine-3'-phosphate
  modified_base 16: mod_base = OTHER; note = 2'-deoxy-2'-fluoroadenosine-3'-phosphate
  modified_base 17: mod_base = OTHER; note = 2'-O-methyladenosine-3'-phosphate
  modified_base 18: mod_base = OTHER; note = 2'-O-methylguanosine-3'-phosphate
  modified_base 19: mod_base = OTHER; note = 2'-O-methylcytidine-3'-phosphate
  modified_base 20: mod_base = OTHER; note = 2'-O-methyladenosine-3'-phosphate
  modified_base 21: mod_base = OTHER; note = 2'-O-methyladenosine-3'-phosphorothioate
  modified_base 22: mod_base = OTHER; note = 2'-O-methyladenosine-3'-phosphorothioate
  modified_base 23: mod_base = OTHER; note = 2'-O-methylguanosine
  misc_feature 1..4: note = RNA
  misc_feature 6..23: note = RNA
  misc_feature 5: note = DNA
tagctacttcaaagcaagcaaag

SEQ ID NO: 1372 - DNA, 23 bp, synthetic construct
  source 1..23: mol_type = other DNA
  modified_base 1: mod_base = OTHER; note = 2'-O-methyluridine-3'-phosphate 5'-(E)-Vinylphosphonate
  modified_base 2: mod_base = OTHER; note = 2'-deoxy-2'-fluoroadenosine-3'-phosphate
  modified_base 3: mod_base = OTHER; note = 2'-O-methyluridine-3'-phosphate
  modified_base 4: mod_base = OTHER; note = 2'-O-methyluridine-3'-phosphate
  modified_base 6: mod_base = OTHER; note = 2'-O-methyladenosine-3'-phosphate
  modified_base 7: mod_base = OTHER; note = cytidine-2'-phosphate
  modified_base 8: mod_base = OTHER; note = 2'-O-methyluridine-3'-phosphate
  modified_base 9: mod_base = OTHER; note = 2'-O-methyladenosine-3'-phosphate
  modified_base 10: mod_base = OTHER; note = 2'-O-methyluridine-3'-phosphate
  modified_base 11: mod_base = OTHER; note = 2'-O-methyladenosine-3'-phosphate
  modified_base 12: mod_base = OTHER; note = 2'-O-methyladenosine-3'-phosphate
  modified_base 13: mod_base = OTHER; note = 2'-O-methylcytidine-3'-phosphate
  modified_base 14: mod_base = OTHER; note = 2'-deoxy-2'-fluorouridine-3'-phosphate
  modified_base 15: mod_base = OTHER; note = 2'-O-methyluridine-3'-phosphate
  modified_base 16: mod_base = OTHER; note = 2'-deoxy-2'-fluoroadenosine-3'-phosphate
  modified_base 17: mod_base = OTHER; note = 2'-O-methyladenosine-3'-phosphate
  modified_base 18: mod_base = OTHER; note = 2'-O-methylcytidine-3'-phosphate
  modified_base 19: mod_base = OTHER; note = 2'-O-methyladenosine-3'-phosphate
  modified_base 20: mod_base = OTHER; note = 2'-O-methylcytidine-3'-phosphate
  modified_base 21: mod_base = OTHER; note = 2'-O-methyluridine-3'-phosphorothioate
  modified_base 22: mod_base = OTHER; note = 2'-O-methyladenosine-3'-phosphorothioate
  modified_base 23: mod_base = OTHER; note = 2'-O-methylcytidine
  misc_feature 1..4: note = RNA
  misc_feature 6..23: note = RNA
  misc_feature 5: note = DNA
tattcactataacttaacactac

SEQ ID NO: 1373 - DNA, 23 bp, synthetic construct
  source 1..23: mol_type = other DNA
  modified_base 1: mod_base = OTHER; note = 2'-O-methyluridine-3'-phosphate 5'-(E)-Vinylphosphonate
  modified_base 2: mod_base = OTHER; note = 2'-deoxy-2'-fluoroguanosine-3'-phosphate
  modified_base 3: mod_base = OTHER; note = 2'-O-methyluridine-3'-phosphate
  modified_base 4: mod_base = OTHER; note = 2'-O-methyladenosine-3'-phosphate
  modified_base 6: mod_base = OTHER; note = 2'-O-methyluridine-3'-phosphate
  modified_base 7: mod_base = OTHER; note = cytidine-2'-phosphate
  modified_base 8: mod_base = OTHER; note = 2'-O-methyladenosine-3'-phosphate
  modified_base 9: mod_base = OTHER; note = 2'-O-methylcytidine-3'-phosphate
  modified_base 10: mod_base = OTHER; note = 2'-O-methyluridine-3'-phosphate
  modified_base 11: mod_base = OTHER; note = 2'-O-methyladenosine-3'-phosphate
  modified_base 12: mod_base = OTHER; note = 2'-O-methyluridine-3'-phosphate
  modified_base 13: mod_base = OTHER; note = 2'-O-methyladenosine-3'-phosphate
  modified_base 14: mod_base = OTHER; note = 2'-deoxy-2'-fluoroadenosine-3'-phosphate
  modified_base 15: mod_base = OTHER; note = 2'-O-methylcytidine-3'-phosphate
  modified_base 16: mod_base = OTHER; note = 2'-deoxy-2'-fluorouridine-3'-phosphate
  modified_base 17: mod_base = OTHER; note = 2'-O-methyluridine-3'-phosphate
  modified_base 18: mod_base = OTHER; note = 2'-O-methyladenosine-3'-phosphate
  modified_base 19: mod_base = OTHER; note = 2'-O-methyladenosine-3'-phosphate
  modified_base 20: mod_base = OTHER; note = 2'-O-methylcytidine-3'-phosphate
  modified_base 21: mod_base = OTHER; note = 2'-O-methyladenosine-3'-phosphorothioate
  modified_base 22: mod_base = OTHER; note = 2'-O-methylcytidine-3'-phosphorothioate
  modified_base 23: mod_base = OTHER; note = 2'-O-methyluridine
  misc_feature 1..4: note = RNA
  misc_feature 6..23: note = RNA
  misc_feature 5: note = DNA
tgtattcactataacttaacact

SEQ ID NO: 1374 - DNA, 23 bp, synthetic construct
  source 1..23: mol_type = other DNA
  modified_base 1: mod_base = OTHER; note = 2'-O-methyluridine-3'-phosphate 5'-(E)-Vinylphosphonate
  modified_base 2: mod_base = OTHER; note = 2'-deoxy-2'-fluorouridine-3'-phosphate
  modified_base 3: mod_base = OTHER; note = 2'-O-methyluridine-3'-phosphate
  modified_base 4: mod_base = OTHER; note = 2'-O-methyladenosine-3'-phosphate
  modified_base 6: mod_base = OTHER; note = 2'-O-methyluridine-3'-phosphate
  modified_base 7: mod_base = OTHER; note = guanosine-2'-phosphate
  modified_base 8: mod_base = OTHER; note = 2'-O-methyluridine-3'-phosphate
  modified_base 9: mod_base = OTHER; note = 2'-O-methyluridine-3'-phosphate
  modified_base 10: mod_base = OTHER; note = 2'-O-methylcytidine-3'-phosphate
  modified_base 11: mod_base = OTHER; note = 2'-O-methyluridine-3'-phosphate
  modified_base 12: mod_base = OTHER; note = 2'-O-methyladenosine-3'-phosphate
  modified_base 13: mod_base = OTHER; note = 2'-O-methylcytidine-3'-phosphate
  modified_base 14: mod_base = OTHER; note = 2'-deoxy-2'-fluoroadenosine-3'-phosphate
  modified_base 15: mod_base = OTHER; note = 2'-O-methylcytidine-3'-phosphate
  modified_base 16: mod_base = OTHER; note = 2'-deoxy-2'-fluorocytidine-3'-phosphate
  modified_base 17: mod_base = OTHER; note = 2'-O-methyladenosine-3'-phosphate
  modified_base 18: mod_base = OTHER; note = 2'-O-methyluridine-3'-phosphate
  modified_base 19: mod_base = OTHER; note = 2'-O-methyluridine-3'-phosphate
  modified_base 20: mod_base = OTHER; note = 2'-O-methyladenosine-3'-phosphate
  modified_base 21: mod_base = OTHER; note = 2'-O-methylcytidine-3'-phosphorothioate
  modified_base 22: mod_base = OTHER; note = 2'-O-methyluridine-3'-phosphorothioate
  modified_base 23: mod_base = OTHER; note = 2'-O-methylcytidine
  misc_feature 1..4: note = RNA
  misc_feature 6..23: note = RNA
  misc_feature 5: note = DNA
tttagtgttctacaccattactc

SEQ ID NO: 1375 - DNA, 23 bp, synthetic construct
  source 1..23: mol_type = other DNA
  modified_base 1: mod_base = OTHER; note = 2'-O-methyluridine-3'-phosphate 5'-(E)-Vinylphosphonate
  modified_base 2: mod_base = OTHER; note = 2'-deoxy-2'-fluoroadenosine-3'-phosphate
  modified_base 3: mod_base = OTHER; note = 2'-O-methyladenosine-3'-phosphate
  modified_base 4: mod_base = OTHER; note = 2'-O-methyluridine-3'-phosphate
  modified_base 6: mod_base = OTHER; note = 2'-O-methyladenosine-3'-phosphate
  modified_base 7: mod_base = OTHER; note = guanosine-2'-phosphate
  modified_base 8: mod_base = OTHER; note = 2'-O-methyluridine-3'-phosphate
  modified_base 9: mod_base = OTHER; note = 2'-O-methylguanosine-3'-phosphate
  modified_base 10: mod_base = OTHER; note = 2'-O-methyluridine-3'-phosphate
  modified_base 11: mod_base = OTHER; note = 2'-O-methyluridine-3'-phosphate
  modified_base 12: mod_base = OTHER; note = 2'-O-methylcytidine-3'-phosphate
  modified_base 13: mod_base = OTHER; note = 2'-O-methyluridine-3'-phosphate
  modified_base 14: mod_base = OTHER; note = 2'-deoxy-2'-fluoroadenosine-3'-phosphate
  modified_base 15: mod_base = OTHER; note = 2'-O-methylcytidine-3'-phosphate
  modified_base 16: mod_base = OTHER; note = 2'-deoxy-2'-fluoroadenosine-3'-phosphate
  modified_base 17: mod_base = OTHER; note = 2'-O-methylcytidine-3'-phosphate
  modified_base 18: mod_base = OTHER; note = 2'-O-methylcytidine-3'-phosphate
  modified_base 19: mod_base = OTHER; note = 2'-O-methyladenosine-3'-phosphate
  modified_base 20: mod_base = OTHER; note = 2'-O-methyluridine-3'-phosphate
  modified_base 21: mod_base = OTHER; note = 2'-O-methyluridine-3'-phosphorothioate
  modified_base 22: mod_base = OTHER; note = 2'-O-methyladenosine-3'-phosphorothioate
  modified_base 23: mod_base = OTHER; note = 2'-O-methylcytidine
  misc_feature 1..4: note = RNA
  misc_feature 6..23: note = RNA
  misc_feature 5: note = DNA
taattagtgttctacaccattac

SEQ ID NO: 1376 - DNA, 23 bp, synthetic construct
  source 1..23: mol_type = other DNA
  modified_base 1: mod_base = OTHER; note = 2'-O-methyluridine-3'-phosphate 5'-(E)-Vinylphosphonate
  modified_base 2: mod_base = OTHER; note = 2'-deoxy-2'-fluorouridine-3'-phosphate
  modified_base 3: mod_base = OTHER; note = 2'-O-methyluridine-3'-phosphate
  modified_base 4: mod_base = OTHER; note = 2'-O-methyladenosine-3'-phosphate
  modified_base 6: mod_base = OTHER; note = 2'-O-methyladenosine-3'-phosphate
  modified_base 7: mod_base = OTHER; note = guanosine-2'-phosphate
  modified_base 8: mod_base = OTHER; note = 2'-O-methyluridine-3'-phosphate
  modified_base 9: mod_base = OTHER; note = 2'-O-methylguanosine-3'-phosphate
  modified_base 10: mod_base = OTHER; note = 2'-O-methyladenosine-3'-phosphate
  modified_base 11: mod_base = OTHER; note = 2'-O-methyluridine-3'-phosphate
  modified_base 12: mod_base = OTHER; note = 2'-O-methyluridine-3'-phosphate
  modified_base 13: mod_base = OTHER; note = 2'-O-methyladenosine-3'-phosphate
  modified_base 14: mod_base = OTHER; note = 2'-deoxy-2'-fluorouridine-3'-phosphate
  modified_base 15: mod_base = OTHER; note = 2'-O-methylguanosine-3'-phosphate
  modified_base 16: mod_base = OTHER; note = 2'-deoxy-2'-fluoroadenosine-3'-phosphate
  modified_base 17: mod_base = OTHER; note = 2'-O-methyladenosine-3'-phosphate
  modified_base 18: mod_base = OTHER; note = 2'-O-methyluridine-3'-phosphate
  modified_base 19: mod_base = OTHER; note = 2'-O-methyluridine-3'-phosphate
  modified_base 20: mod_base = OTHER; note = 2'-O-methyladenosine-3'-phosphate
  modified_base 21: mod_base = OTHER; note = 2'-O-methylguanosine-3'-phosphorothioate
  modified_base 22: mod_base = OTHER; note = 2'-O-methyluridine-3'-phosphorothioate
  modified_base 23: mod_base = OTHER; note = 2'-O-methylguanosine
  misc_feature 1..4: note = RNA
  misc_feature 6..23: note = RNA
  misc_feature 5: note = DNA
tttagagtgattatgaattagtg

SEQ ID NO: 1377 - DNA, 23 bp, synthetic construct
  source 1..23: mol_type = other DNA
  modified_base 1: mod_base = OTHER; note = 2'-O-methyluridine-3'-phosphate 5'-(E)-Vinylphosphonate
  modified_base 2: mod_base = OTHER; note = 2'-deoxy-2'-fluorocytidine-3'-phosphate
  modified_base 3: mod_base = OTHER; note = 2'-O-methyluridine-3'-phosphate
  modified_base 4: mod_base = OTHER; note = 2'-O-methyladenosine-3'-phosphate
  modified_base 6: mod_base = OTHER; note = 2'-O-methylcytidine-3'-phosphate
  modified_base 7: mod_base = OTHER; note = cytidine-2'-phosphate
  modified_base 8: mod_base = OTHER; note = 2'-O-methyladenosine-3'-phosphate
  modified_base 9: mod_base = OTHER; note = 2'-O-methyluridine-3'-phosphate
  modified_base 10: mod_base = OTHER; note = 2'-O-methyladenosine-3'-phosphate
  modified_base 11: mod_base = OTHER; note = 2'-O-methylcytidine-3'-phosphate
  modified_base 12: mod_base = OTHER; note = 2'-O-methyladenosine-3'-phosphate
  modified_base 13: mod_base = OTHER; note = 2'-O-methyluridine-3'-phosphate
  modified_base 14: mod_base = OTHER; note = 2'-deoxy-2'-fluoroadenosine-3'-phosphate
  modified_base 15: mod_base = OTHER; note = 2'-O-methyluridine-3'-phosphate
  modified_base 16: mod_base = OTHER; note = 2'-deoxy-2'-fluorocytidine-3'-phosphate
  modified_base 17: mod_base = OTHER; note = 2'-O-methylcytidine-3'-phosphate
  modified_base 18: mod_base = OTHER; note = 2'-O-methylcytidine-3'-phosphate
  modified_base 19: mod_base = OTHER; note = 2'-O-methyladenosine-3'-phosphate
  modified_base 20: mod_base = OTHER; note = 2'-O-methyladenosine-3'-phosphate
  modified_base 21: mod_base = OTHER; note = 2'-O-methyladenosine-3'-phosphorothioate
  modified_base 22: mod_base = OTHER; note = 2'-O-methyluridine-3'-phosphorothioate
  modified_base 23: mod_base = OTHER; note = 2'-O-methyladenosine
  misc_feature 1..4: note = RNA
  misc_feature 6..23: note = RNA
  misc_feature 5: note = DNA
tctacccatacatatcccaaata

SEQ ID NO: 1378 - DNA, 23 bp, synthetic construct
  source 1..23: mol_type = other DNA
  modified_base 1: mod_base = OTHER; note = 2'-O-methyluridine-3'-phosphate 5'-(E)-Vinylphosphonate
  modified_base 2: mod_base = OTHER; note = 2'-deoxy-2'-fluorocytidine-3'-phosphate
  modified_base 3: mod_base = OTHER; note = 2'-O-methyladenosine-3'-phosphate
  modified_base 4: mod_base = OTHER; note = 2'-O-methylcytidine-3'-phosphate
  modified_base 6: mod_base = OTHER; note = 2'-O-methyluridine-3'-phosphate
  modified_base 7: mod_base = OTHER; note = cytidine-2'-phosphate
  modified_base 8: mod_base = OTHER; note = 2'-O-methyluridine-3'-phosphate
  modified_base 9: mod_base = OTHER; note = 2'-O-methyluridine-3'-phosphate
  modified_base 10: mod_base = OTHER; note = 2'-O-methyladenosine-3'-phosphate
  modified_base 11: mod_base = OTHER; note = 2'-O-methylcytidine-3'-phosphate
  modified_base 12: mod_base = OTHER; note = 2'-O-methyluridine-3'-phosphate
  modified_base 13: mod_base = OTHER; note = 2'-O-methylguanosine-3'-phosphate
  modified_base 14: mod_base = OTHER; note = 2'-deoxy-2'-fluoroadenosine-3'-phosphate
  modified_base 15: mod_base = OTHER; note = 2'-O-methyluridine-3'-phosphate
  modified_base 16: mod_base = OTHER; note = 2'-deoxy-2'-fluorouridine-3'-phosphate
  modified_base 17: mod_base = OTHER; note = 2'-O-methyluridine-3'-phosphate
  modified_base 18: mod_base = OTHER; note = 2'-O-methyladenosine-3'-phosphate
  modified_base 19: mod_base = OTHER; note = 2'-O-methylcytidine-3'-phosphate
  modified_base 20: mod_base = OTHER; note = 2'-O-methylcytidine-3'-phosphate
  modified_base 21: mod_base = OTHER; note = 2'-O-methylcytidine-3'-phosphorothioate
  modified_base 22: mod_base = OTHER; note = 2'-O-methyluridine-3'-phosphorothioate
  modified_base 23: mod_base = OTHER; note = 2'-O-methyladenosine
  misc_feature 1..4: note = RNA
  misc_feature 6..23: note = RNA
  misc_feature 5: note = DNA
tcacctcttactgatttacccta

SEQ ID NO: 1379 - DNA, 23 bp, synthetic construct
  source 1..23: mol_type = other DNA
  modified_base 1: mod_base = OTHER; note = 2'-O-methyluridine-3'-phosphate 5'-(E)-Vinylphosphonate
  modified_base 2: mod_base = OTHER; note = 2'-deoxy-2'-fluoroadenosine-3'-phosphate
  modified_base 3: mod_base = OTHER; note = 2'-O-methyladenosine-3'-phosphate
  modified_base 4: mod_base = OTHER; note = 2'-O-methylcytidine-3'-phosphate
  modified_base 6: mod_base = OTHER; note = 2'-O-methylcytidine-3'-phosphate
  modified_base 7: mod_base = OTHER; note = cytidine-2'-phosphate
  modified_base 8: mod_base = OTHER; note = 2'-O-methyluridine-3'-phosphate
  modified_base 9: mod_base = OTHER; note = 2'-O-methylcytidine-3'-phosphate
  modified_base 10: mod_base = OTHER; note = 2'-O-methyluridine-3'-phosphate
  modified_base 11: mod_base = OTHER; note = 2'-O-methyluridine-3'-phosphate
  modified_base 12: mod_base = OTHER; note = 2'-O-methyladenosine-3'-phosphate
  modified_base 13: mod_base = OTHER; note = 2'-O-methylcytidine-3'-phosphate
  modified_base 14: mod_base = OTHER; note = 2'-deoxy-2'-fluorouridine-3'-phosphate
  modified_base 15: mod_base = OTHER; note = 2'-O-methylguanosine-3'-phosphate
  modified_base 16: mod_base = OTHER; note = 2'-deoxy-2'-fluoroadenosine-3'-phosphate
  modified_base 17: mod_base = OTHER; note = 2'-O-methyluridine-3'-phosphate
  modified_base 18: mod_base = OTHER; note = 2'-O-methyluridine-3'-phosphate
  modified_base 19: mod_base = OTHER; note = 2'-O-methyluridine-3'-phosphate
  modified_base 20: mod_base = OTHER; note = 2'-O-methyladenosine-3'-phosphate
  modified_base 21: mod_base = OTHER; note = 2'-O-methylcytidine-3'-phosphorothioate
  modified_base 22: mod_base = OTHER; note = 2'-O-methylcytidine-3'-phosphorothioate
  modified_base 23: mod_base = OTHER; note = 2'-O-methylcytidine
  misc_feature 1..4: note = RNA
  misc_feature 6..23: note = RNA
  misc_feature 5: note = DNA
taacacctcttactgatttaccc

SEQ ID NO: 1380 - DNA, 23 bp, synthetic construct
  source 1..23: mol_type = other DNA
  modified_base 1: mod_base = OTHER; note = 2'-O-methyluridine-3'-phosphate 5'-(E)-Vinylphosphonate
  modified_base 2: mod_base = OTHER; note = 2'-deoxy-2'-fluorouridine-3'-phosphate
  modified_base 3: mod_base = OTHER; note = 2'-O-methyladenosine-3'-phosphate
  modified_base 4: mod_base = OTHER; note = 2'-O-methyladenosine-3'-phosphate
  modified_base 6: mod_base = OTHER; note = 2'-O-methyladenosine-3'-phosphate
  modified_base 7: mod_base = OTHER; note = cytidine-2'-phosphate
  modified_base 8: mod_base = OTHER; note = 2'-O-methylcytidine-3'-phosphate
  modified_base 9: mod_base = OTHER; note = 2'-O-methyluridine-3'-phosphate
  modified_base 10: mod_base = OTHER; note = 2'-O-methylcytidine-3'-phosphate
  modified_base 11: mod_base = OTHER; note = 2'-O-methyluridine-3'-phosphate
  modified_base 12: mod_base = OTHER; note = 2'-O-methyluridine-3'-phosphate
  modified_base 13: mod_base = OTHER; note = 2'-O-methyladenosine-3'-phosphate
  modified_base 14: mod_base = OTHER; note = 2'-deoxy-2'-fluorocytidine-3'-phosphate
  modified_base 15: mod_base = OTHER; note = 2'-O-methyluridine-3'-phosphate
  modified_base 16: mod_base = OTHER; note = 2'-deoxy-2'-fluoroguanosine-3'-phosphate
  modified_base 17: mod_base = OTHER; note = 2'-O-methyladenosine-3'-phosphate
  modified_base 18: mod_base = OTHER; note = 2'-O-methyluridine-3'-phosphate
  modified_base 19: mod_base = OTHER; note = 2'-O-methyluridine-3'-phosphate
  modified_base 20: mod_base = OTHER; note = 2'-O-methyluridine-3'-phosphate
  modified_base 21: mod_base = OTHER; note = 2'-O-methyladenosine-3'-phosphorothioate
  modified_base 22: mod_base = OTHER; note = 2'-O-methylcytidine-3'-phosphorothioate
  modified_base 23: mod_base = OTHER; note = 2'-O-methylcytidine
  misc_feature 1..4: note = RNA
  misc_feature 6..23: note = RNA
  misc_feature 5: note = DNA
ttaacacctcttactgatttacc

SEQ ID NO: 1381 - DNA, 23 bp, synthetic construct
  source 1..23: mol_type = other DNA
  modified_base 1: mod_base = OTHER; note = 2'-O-methyluridine-3'-phosphate 5'-(E)-Vinylphosphonate
  modified_base 2: mod_base = OTHER; note = 2'-deoxy-2'-fluoroadenosine-3'-phosphate
  modified_base 3: mod_base = OTHER; note = 2'-O-methyladenosine-3'-phosphate
  modified_base 4: mod_base = OTHER; note = 2'-O-methyluridine-3'-phosphate
  modified_base 6: mod_base = OTHER; note = 2'-O-methyladenosine-3'-phosphate
  modified_base 7: mod_base = OTHER; note = cytidine-2'-phosphate
  modified_base 8: mod_base = OTHER; note = 2'-O-methyladenosine-3'-phosphate
  modified_base 9: mod_base = OTHER; note = 2'-O-methylcytidine-3'-phosphate
  modified_base 10: mod_base = OTHER; note = 2'-O-methylcytidine-3'-phosphate
  modified_base 11: mod_base = OTHER; note = 2'-O-methyluridine-3'-phosphate
  modified_base 12: mod_base = OTHER; note = 2'-O-methylcytidine-3'-phosphate
  modified_base 13: mod_base = OTHER; note = 2'-O-methyluridine-3'-phosphate
  modified_base 14: mod_base = OTHER; note = 2'-deoxy-2'-fluorouridine-3'-phosphate
  modified_base 15: mod_base = OTHER; note = 2'-O-methyladenosine-3'-phosphate
  modified_base 16: mod_base = OTHER; note = 2'-deoxy-2'-fluorocytidine-3'-phosphate
  modified_base 17: mod_base = OTHER; note = 2'-O-methyluridine-3'-phosphate
  modified_base 18: mod_base = OTHER; note = 2'-O-methylguanosine-3'-phosphate
  modified_base 19: mod_base = OTHER; note = 2'-O-methyladenosine-3'-phosphate
  modified_base 20: mod_base = OTHER; note = 2'-O-methyluridine-3'-phosphate
  modified_base 21: mod_base = OTHER; note = 2'-O-methyluridine-3'-phosphorothioate
  modified_base 22: mod_base = OTHER; note = 2'-O-methyluridine-3'-phosphorothioate
  modified_base 23: mod_base = OTHER; note = 2'-O-methyladenosine
  misc_feature 1..4: note = RNA
  misc_feature 6..23: note = RNA
  misc_feature 5: note = DNA
taataacacctcttactgattta

SEQ ID NO: 1382 - RNA, 23 nt, synthetic construct
  source 1..23: mol_type = other RNA
ctgagggtatttgaagtatacca

SEQ ID NO: 1383 - RNA, 23 nt, synthetic construct
  source 1..23: mol_type = other RNA
ctgagggtatttgaagtatacca

SEQ ID NO: 1384 - RNA, 23 nt, synthetic construct
  source 1..23: mol_type = other RNA
gagggtatttgaagtataccata

SEQ ID NO: 1385 - RNA, 23 nt, synthetic construct
  source 1..23: mol_type = other RNA
agggtatttgaagtataccatac

SEQ ID NO: 1386 - RNA, 23 nt, synthetic construct
  source 1..23: mol_type = other RNA
tatttgaagtataccatacaact

SEQ ID NO: 1387 - RNA, 23 nt, synthetic construct
  source 1..23: mol_type = other RNA
atttgaagtataccatacaactg

SEQ ID NO: 1388 - RNA, 23 nt, synthetic construct
  source 1..23: mol_type = other RNA
cgtggacaatggctactcaagct

SEQ ID NO: 1389 - RNA, 23 nt, synthetic construct
  source 1..23: mol_type = other RNA
tggacaatggctactcaagctga

SEQ ID NO: 1390 - RNA, 23 nt, synthetic construct
  source 1..23: mol_type = other RNA
ggacaatggctactcaagctgat

SEQ ID NO: 1391 - RNA, 23 nt, synthetic construct
  source 1..23: mol_type = other RNA
tcaagctgatttgatggagttgg

SEQ ID NO: 1392 - RNA, 23 nt, synthetic construct
  source 1..23: mol_type = other RNA
caagctgatttgatggagttgga

SEQ ID NO: 1393 - RNA, 23 nt, synthetic construct
  source 1..23: mol_type = other RNA
ctccttctctgagtggtaaaggc

SEQ ID NO: 1394 - RNA, 23 nt, synthetic construct
  source 1..23: mol_type = other RNA
ctcagtccttcactcaagaacaa

SEQ ID NO: 1395 - RNA, 23 nt, synthetic construct
  source 1..23: mol_type = other RNA
tccttcactcaagaacaagtagc

SEQ ID NO: 1396 - RNA, 23 nt, synthetic construct
  source 1..23: mol_type = other RNA
ttcactcaagaacaagtagctga

SEQ ID NO: 1397 - RNA, 23 nt, synthetic construct
  source 1..23: mol_type = other RNA
aagtagctgatattgatggacag

SEQ ID NO: 1398 - RNA, 23 nt, synthetic construct
  source 1..23: mol_type = other RNA
atattgatggacagtatgcaatg

SEQ ID NO: 1399 - RNA, 23 nt, synthetic construct
  source 1..23: mol_type = other RNA
acagtatgcaatgactcgagctc

SEQ ID NO: 1400 - RNA, 23 nt, synthetic construct
  source 1..23: mol_type = other RNA
agggtacgagctgctatgttccc

SEQ ID NO: 1401 - RNA, 23 nt, synthetic construct
  source 1..23: mol_type = other RNA
gtacgagctgctatgttccctga

SEQ ID NO: 1402 - RNA, 23 nt, synthetic construct
  source 1..23: mol_type = other RNA
tatgttccctgagacattagatg

SEQ ID NO: 1403 - RNA, 23 nt, synthetic construct
  source 1..23: mol_type = other RNA
tgttccctgagacattagatgag

SEQ ID NO: 1404 - RNA, 23 nt, synthetic construct
  source 1..23: mol_type = other RNA
ttagatgagggcatgcagatccc

SEQ ID NO: 1405 - RNA, 23 nt, synthetic construct
  source 1..23: mol_type = other RNA
tgctgctcatcccactaatgtcc

SEQ ID NO: 1406 - RNA, 23 nt, synthetic construct
  source 1..23: mol_type = other RNA
gaaccatcacagatgctgaaaca

SEQ ID NO: 1407 - RNA, 23 nt, synthetic construct
  source 1..23: mol_type = other RNA
accatcacagatgctgaaacatg

SEQ ID NO: 1408 - RNA, 23 nt, synthetic construct
  source 1..23: mol_type = other RNA
accatcacagatgctgaaacatg

SEQ ID NO: 1409 - RNA, 23 nt, synthetic construct
  source 1..23: mol_type = other RNA
agatgctgaaacatgcagttgta

SEQ ID NO: 1410 - RNA, 23 nt, synthetic construct
  source 1..23: mol_type = other RNA
agatgctgaaacatgcagttgta

SEQ ID NO: 1411 - RNA, 23 nt, synthetic construct
  source 1..23: mol_type = other RNA
aaacatgcagttgtaaacttgat

SEQ ID NO: 1412 - RNA, 23 nt, synthetic construct
  source 1..23: mol_type = other RNA
acatgcagttgtaaacttgatta

SEQ ID NO: 1413 - RNA, 23 nt, synthetic construct
  source 1..23: mol_type = other RNA
acatgcagttgtaaacttgatta

SEQ ID NO: 1414 - RNA, 23 nt, synthetic construct
  source 1..23: mol_type = other RNA
acacgtgcaatccctgaactgac

SEQ ID NO: 1415 - RNA, 23 nt, synthetic construct
  source 1..23: mol_type = other RNA
cgtgcaatccctgaactgacaaa

SEQ ID NO: 1416 - RNA, 23 nt, synthetic construct
  source 1..23: mol_type = other RNA
aggaccaggtggtggttaataag

SEQ ID NO: 1417 - RNA, 23 nt, synthetic construct
  source 1..23: mol_type = other RNA
aggaccaggtggtggttaataag

SEQ ID NO: 1418 - RNA, 23 nt, synthetic construct
  source 1..23: mol_type = other RNA
gaccaggtggtggttaataaggc

SEQ ID NO: 1419 - RNA, 23 nt, synthetic construct
  source 1..23: mol_type = other RNA
tggttaataaggctgcagttatg

SEQ ID NO: 1420 - RNA, 23 nt, synthetic construct
  source 1..23: mol_type = other RNA
ctcctcagatggtgtctgctatt

SEQ ID NO: 1421 - RNA, 23 nt, synthetic construct
  source 1..23: mol_type = other RNA
cctcagatggtgtctgctattgt

SEQ ID NO: 1422 - RNA, 23 nt, synthetic construct
  source 1..23: mol_type = other RNA
tcagatggtgtctgctattgtac

SEQ ID NO: 1423 - RNA, 23 nt, synthetic construct
  source 1..23: mol_type = other RNA
tcagatggtgtctgctattgtac

SEQ ID NO: 1424 - RNA, 23 nt, synthetic construct
  source 1..23: mol_type = other RNA
gtacgtaccatgcagaatacaaa

SEQ ID NO: 1425 - RNA, 23 nt, synthetic construct
  source 1..23: mol_type = other RNA
gtacgtaccatgcagaatacaaa

SEQ ID NO: 1426 - RNA, 23 nt, synthetic construct
  source 1..23: mol_type = other RNA
tacgtaccatgcagaatacaaat

SEQ ID NO: 1427 - RNA, 23 nt, synthetic construct
  source 1..23: mol_type = other RNA
acgtaccatgcagaatacaaatg

SEQ ID NO: 1428 - RNA, 23 nt, synthetic construct
  source 1..23: mol_type = other RNA
cgtaccatgcagaatacaaatga

SEQ ID NO: 1429 - RNA, 23 nt, synthetic construct
  source 1..23: mol_type = other RNA
gtaccatgcagaatacaaatgat

SEQ ID NO: 1430 - RNA, 23 nt, synthetic construct
  source 1..23: mol_type = other RNA
taccatgcagaatacaaatgatg

SEQ ID NO: 1431 - RNA, 23 nt, synthetic construct
  source 1..23: mol_type = other RNA
accatgcagaatacaaatgatgt

SEQ ID NO: 1432 - RNA, 23 nt, synthetic construct
  source 1..23: mol_type = other RNA
ccatgcagaatacaaatgatgta

SEQ ID NO: 1433 - RNA, 23 nt, synthetic construct
  source 1..23: mol_type = other RNA
atgcagaatacaaatgatgtaga

SEQ ID NO: 1434 - RNA, 23 nt, synthetic construct
  source 1..23: mol_type = other RNA
tgcagaatacaaatgatgtagaa

SEQ ID NO: 1435 - RNA, 23 nt, synthetic construct
  source 1..23: mol_type = other RNA
aatgatgtagaaacagctcgttg

SEQ ID NO: 1436 - RNA, 23 nt, synthetic construct
  source 1..23: mol_type = other RNA
atgatgtagaaacagctcgttgt

SEQ ID NO: 1437 - RNA, 23 nt, synthetic construct
  source 1..23: mol_type = other RNA
ttactggccatctttaagtctgg

SEQ ID NO: 1438 - RNA, 23 nt, synthetic construct
  source 1..23: mol_type = other RNA
tactggccatctttaagtctgga

SEQ ID NO: 1439 - RNA, 23 nt, synthetic construct
  source 1..23: mol_type = other RNA
actggccatctttaagtctggag

SEQ ID NO: 1440 - RNA, 23 nt, synthetic construct
  source 1..23: mol_type = other RNA
ctggccatctttaagtctggagg

SEQ ID NO: 1441 - RNA, 23 nt, synthetic construct
  source 1..23: mol_type = other RNA
tggccatctttaagtctggaggc

SEQ ID NO: 1442 - RNA, 23 nt, synthetic construct
  source 1..23: mol_type = other RNA
cttggttcaccagtggattctgt

SEQ ID NO: 1443 - RNA, 23 nt, synthetic construct
  source 1..23: mol_type = other RNA
tcaccagtggattctgtgttgtt

SEQ ID NO: 1444 - RNA, 23 nt, synthetic construct
  source 1..23: mol_type = other RNA
aaatggcagtgcgtttagctggt

SEQ ID NO: 1445 - RNA, 23 nt, synthetic construct
  source 1..23: mol_type = other RNA
aaatggcagtgcgtttagctggt

SEQ ID NO: 1446 - RNA, 23 nt, synthetic construct
  source 1..23: mol_type = other RNA
ggttgccttgctcaacaaaacaa

SEQ ID NO: 1447 - RNA, 23 nt, synthetic construct
  source 1..23: mol_type = other RNA
gttgccttgctcaacaaaacaaa

SEQ ID NO: 1448 - RNA, 23 nt, synthetic construct
  source 1..23: mol_type = other RNA
gttgccttgctcaacaaaacaaa

SEQ ID NO: 1449 - RNA, 23 nt, synthetic construct
  source 1..23: mol_type = other RNA
ttgccttgctcaacaaaacaaat

SEQ ID NO: 1450 - RNA, 23 nt, synthetic construct
  source 1..23: mol_type = other RNA
tgttaaattcttggctattacga

SEQ ID NO: 1451 - RNA, 23 nt, synthetic construct
  source 1..23: mol_type = other RNA
aaattcttggctattacgacaga

SEQ ID NO: 1452 - RNA, 23 nt, synthetic construct
  source 1..23: mol_type = other RNA
ttggctattacgacagactgcct

SEQ ID NO: 1453 - RNA, 23 nt, synthetic construct
  source 1..23: mol_type = other RNA
attacgacagactgccttcaaat

SEQ ID NO: 1454 - RNA, 23 nt, synthetic construct
  source 1..23: mol_type = other RNA
agctttagtaaatataatgagga

SEQ ID NO: 1455 - RNA, 23 nt, synthetic construct
  source 1..23: mol_type = other RNA
aatataatgaggacctatactta

SEQ ID NO: 1456 - RNA, 23 nt, synthetic construct
  source 1..23: mol_type = other RNA
gaagctggtggaatgcaagcttt

SEQ ID NO: 1457 - RNA, 23 nt, synthetic construct
  source 1..23: mol_type = other RNA
gacagatccaagtcaacgtcttg

SEQ ID NO: 1458 - RNA, 23 nt, synthetic construct
  source 1..23: mol_type = other RNA
atccaagtcaacgtcttgttcag

SEQ ID NO: 1459 - RNA, 23 nt, synthetic construct
  source 1..23: mol_type = other RNA
atccaagtcaacgtcttgttcag

SEQ ID NO: 1460 - RNA, 23 nt, synthetic construct
  source 1..23: mol_type = other RNA
tcagaactgtctttggactctca

SEQ ID NO: 1461 - RNA, 23 nt, synthetic construct
  source 1..23: mol_type = other RNA
atctttcagatgctgcaactaaa

SEQ ID NO: 1462 - RNA, 23 nt, synthetic construct
  source 1..23: mol_type = other RNA
tttcagatgctgcaactaaacag

SEQ ID NO: 1463 - RNA, 23 nt, synthetic construct
  source 1..23: mol_type = other RNA
cagatgctgcaactaaacaggaa

SEQ ID NO: 1464 - RNA, 23 nt, synthetic construct
  source 1..23: mol_type = other RNA
tgctgcaactaaacaggaaggga

SEQ ID NO: 1465 - RNA, 23 nt, synthetic construct
  source 1..23: mol_type = other RNA
aggaagggatggaaggtctcctt

SEQ ID NO: 1466 - RNA, 23 nt, synthetic construct
  source 1..23: mol_type = other RNA
agcttctgggttcagatgatata

SEQ ID NO: 1467 - RNA, 23 nt, synthetic construct
  source 1..23: mol_type = other RNA
cacctgtgcagctggaattcttt

SEQ ID NO: 1468 - RNA, 23 nt, synthetic construct
  source 1..23: mol_type = other RNA
cctgtgcagctggaattctttct

SEQ ID NO: 1469 - RNA, 23 nt, synthetic construct
  source 1..23: mol_type = other RNA
ggaattctttctaacctcacttg

SEQ ID NO: 1470 - RNA, 23 nt, synthetic construct
  source 1..23: mol_type = other RNA
aattctttctaacctcacttgca

SEQ ID NO: 1471 - RNA, 23 nt, synthetic construct
  source 1..23: mol_type = other RNA
ttctttctaacctcacttgcaat

SEQ ID NO: 1472 - RNA, 23 nt, synthetic construct
  source 1..23: mol_type = other RNA
tctttctaacctcacttgcaata

SEQ ID NO: 1473 - RNA, 23 nt, synthetic construct
  source 1..23: mol_type = other RNA
ttctaacctcacttgcaataatt

SEQ ID NO: 1474 - RNA, 23 nt, synthetic construct
  source 1..23: mol_type = other RNA
tctaacctcacttgcaataatta

SEQ ID NO: 1475 - RNA, 23 nt, synthetic construct
  source 1..23: mol_type = other RNA
ctaacctcacttgcaataattat

SEQ ID NO: 1476 - RNA, 23 nt, synthetic construct
  source 1..23: mol_type = other RNA
taacctcacttgcaataattata

SEQ ID NO: 1477 - RNA, 23 nt, synthetic construct
  source 1..23: mol_type = other RNA
aacctcacttgcaataattataa

SEQ ID NO: 1478 - RNA, 23 nt, synthetic construct
  source 1..23: mol_type = other RNA
acctcacttgcaataattataag

SEQ ID NO: 1479 - RNA, 23 nt, synthetic construct
  source 1..23: mol_type = other RNA
acctcacttgcaataattataag

SEQ ID NO: 1480 - RNA, 23 nt, synthetic construct
  source 1..23: mol_type = other RNA
cctcacttgcaataattataaga

SEQ ID NO: 1481 - RNA, 23 nt, synthetic construct
  source 1..23: mol_type = other RNA
ctcacttgcaataattataagaa

SEQ ID NO: 1482 - RNA, 23 nt, synthetic construct
  source 1..23: mol_type = other RNA
gccaagtgggtggtatagaggct

SEQ ID NO: 1483 - RNA, 23 nt, synthetic construct
  source 1..23: mol_type = other RNA
aggctcttgtgcgtactgtcctt

SEQ ID NO: 1484 - RNA, 23 nt, synthetic construct
  source 1..23: mol_type = other RNA
agcctgccatctgtgctcttcgt

SEQ ID NO: 1485 - RNA, 23 nt, synthetic construct
  source 1..23: mol_type = other RNA
gcctgccatctgtgctcttcgtc

SEQ ID NO: 1486 - RNA, 23 nt, synthetic construct
  source 1..23: mol_type = other RNA
cctgccatctgtgctcttcgtca

SEQ ID NO: 1487 - RNA, 23 nt, synthetic construct
  source 1..23: mol_type = other RNA
ctgccatctgtgctcttcgtcat

SEQ ID NO: 1488 - RNA, 23 nt, synthetic construct
  source 1..23: mol_type = other RNA
tgccatctgtgctcttcgtcatc

SEQ ID NO: 1489 - RNA, 23 nt, synthetic construct
  source 1..23: mol_type = other RNA
ccatctgtgctcttcgtcatctg

SEQ ID NO: 1490-1491 - skipped (2 entries)

SEQ ID NO: 1492 - RNA, 23 nt, synthetic construct
  source 1..23: mol_type = other RNA
catctgtgctcttcgtcatctga

SEQ ID NO: 1493 - RNA, 23 nt, synthetic construct
  source 1..23: mol_type = other RNA
atctgtgctcttcgtcatctgac

SEQ ID NO: 1494 - RNA, 23 nt, synthetic construct
  source 1..23: mol_type = other RNA
tctgtgctcttcgtcatctgacc

SEQ ID NO: 1495 - RNA, 23 nt, synthetic construct
  source 1..23: mol_type = other RNA
tatggactaccagttgtggttaa

SEQ ID NO: 1496 - RNA, 23 nt, synthetic construct
  source 1..23: mol_type = other RNA
tggactaccagttgtggttaagc

SEQ ID NO: 1497 - RNA, 23 nt, synthetic construct
  source 1..23: mol_type = other RNA
gttgtggttaagctcttacaccc

SEQ ID NO: 1498 - RNA, 23 nt, synthetic construct
  source 1..23: mol_type = other RNA
ctgataaaggctactgttggatt

SEQ ID NO: 1499 - RNA, 23 nt, synthetic construct
  source 1..23: mol_type = other RNA
tgataaaggctactgttggattg

SEQ ID NO: 1500 - RNA, 23 nt, synthetic construct
  source 1..23: mol_type = other RNA
tgataaaggctactgttggattg

SEQ ID NO: 1501 - RNA, 23 nt, synthetic construct
  source 1..23: mol_type = other RNA
taaaggctactgttggattgatt

SEQ ID NO: 1502 - RNA, 23 nt, synthetic construct
  source 1..23: mol_type = other RNA
taaaggctactgttggattgatt

SEQ ID NO: 1503 - RNA, 23 nt, synthetic construct
  source 1..23: mol_type = other RNA
aaaggctactgttggattgattc

SEQ ID NO: 1504 - RNA, 23 nt, synthetic construct
  source 1..23: mol_type = other RNA
aaggctactgttggattgattcg

SEQ ID NO: 1505 - RNA, 23 nt, synthetic construct
  source 1..23: mol_type = other RNA
aggctactgttggattgattcga

SEQ ID NO: 1506 - RNA, 23 nt, synthetic construct
  source 1..23: mol_type = other RNA
ggctactgttggattgattcgaa

SEQ ID NO: 1507 - RNA, 23 nt, synthetic construct
  source 1..23: mol_type = other RNA
gctactgttggattgattcgaaa

SEQ ID NO: 1508 - RNA, 23 nt, synthetic construct
  source 1..23: mol_type = other RNA
ctactgttggattgattcgaaat

SEQ ID NO: 1509 - RNA, 23 nt, synthetic construct
  source 1..23: mol_type = other RNA
tactgttggattgattcgaaatc

SEQ ID NO: 1510 - RNA, 23 nt, synthetic construct
  source 1..23: mol_type = other RNA
ctgttggattgattcgaaatctt

SEQ ID NO: 1511 - RNA, 23 nt, synthetic construct
  source 1..23: mol_type = other RNA
ctgttggattgattcgaaatctt

SEQ ID NO: 1512 - RNA, 23 nt, synthetic construct
  source 1..23: mol_type = other RNA
tgttggattgattcgaaatcttg

SEQ ID NO: 1513 - RNA, 23 nt, synthetic construct
  source 1..23: mol_type = other RNA
ttggattgattcgaaatcttgcc

SEQ ID NO: 1514 - RNA, 23 nt, synthetic construct
  source 1..23: mol_type = other RNA
ttggattgattcgaaatcttgcc

SEQ ID NO: 1515 - RNA, 23 nt, synthetic construct
  source 1..23: mol_type = other RNA
gattgattcgaaatcttgccctt

SEQ ID NO: 1516 - RNA, 23 nt, synthetic construct
  source 1..23: mol_type = other RNA
ccattccacgactagttcagttg

SEQ ID NO: 1517 - RNA, 23 nt, synthetic construct
  source 1..23: mol_type = other RNA
ttccacgactagttcagttgctt

SEQ ID NO: 1518 - RNA, 23 nt, synthetic construct
  source 1..23: mol_type = other RNA
agttcagttgcttgttcgtgcac

SEQ ID NO: 1519 - RNA, 23 nt, synthetic construct
  source 1..23: mol_type = other RNA
tgggacacagcagcaatttgtgg

SEQ ID NO: 1520 - RNA, 23 nt, synthetic construct
  source 1..23: mol_type = other RNA
acatcctagctcgggatgttcac

SEQ ID NO: 1521 - RNA, 23 nt, synthetic construct
  source 1..23: mol_type = other RNA
ctagctcgggatgttcacaaccg

SEQ ID NO: 1522 - RNA, 23 nt, synthetic construct
  source 1..23: mol_type = other RNA
gggatgttcacaaccgaattgtt

SEQ ID NO: 1523 - RNA, 23 nt, synthetic construct
  source 1..23: mol_type = other RNA
gttatcagaggactaaataccat

SEQ ID NO: 1524 - RNA, 23 nt, synthetic construct
  source 1..23: mol_type = other RNA
ttatcagaggactaaataccatt

SEQ ID NO: 1525 - RNA, 23 nt, synthetic construct
  source 1..23: mol_type = other RNA
tatcagaggactaaataccattc

SEQ ID NO: 1526 - RNA, 23 nt, synthetic construct
  source 1..23: mol_type = other RNA
cagaggactaaataccattccat

SEQ ID NO: 1527 - RNA, 23 nt, synthetic construct
  source 1..23: mol_type = other RNA
cagaggactaaataccattccat

SEQ ID NO: 1528 - RNA, 23 nt, synthetic construct
  source 1..23: mol_type = other RNA
gaggactaaataccattccattg

SEQ ID NO: 1529 - RNA, 23 nt, synthetic construct
  source 1..23: mol_type = other RNA
ggactaaataccattccattgtt

SEQ ID NO: 1530 - RNA, 23 nt, synthetic construct
  source 1..23: mol_type = other RNA
gactaaataccattccattgttt

SEQ ID NO: 1531 - RNA, 23 nt, synthetic construct
  source 1..23: mol_type = other RNA
actaaataccattccattgtttg

SEQ ID NO: 1532 - RNA, 23 nt, synthetic construct
  source 1..23: mol_type = other RNA
ctaaataccattccattgtttgt

SEQ ID NO: 1533 - RNA, 23 nt, synthetic construct
  source 1..23: mol_type = other RNA
taaataccattccattgtttgtg

SEQ ID NO: 1534 - RNA, 23 nt, synthetic construct
  source 1..23: mol_type = other RNA
aaataccattccattgtttgtgc

SEQ ID NO: 1535 - RNA, 23 nt, synthetic construct
  source 1..23: mol_type = other RNA
aaataccattccattgtttgtgc

SEQ ID NO: 1536 - RNA, 23 nt, synthetic construct
  source 1..23: mol_type = other RNA
aataccattccattgtttgtgca

SEQ ID NO: 1537 - RNA, 23 nt, synthetic construct
  source 1..23: mol_type = other RNA
ataccattccattgtttgtgcag

SEQ ID NO: 1538 - RNA, 23 nt, synthetic construct
  source 1..23: mol_type = other RNA
ataccattccattgtttgtgcag

SEQ ID NO: 1539 - RNA, 23 nt, synthetic construct
  source 1..23: mol_type = other RNA
taccattccattgtttgtgcagc

SEQ ID NO: 1540 - RNA, 23 nt, synthetic construct
  source 1..23: mol_type = other RNA
accattccattgtttgtgcagct

SEQ ID NO: 1541 - RNA, 23 nt, synthetic construct
  source 1..23: mol_type = other RNA
attccattgtttgtgcagctgct

SEQ ID NO: 1542 - RNA, 23 nt, synthetic construct
  source 1..23: mol_type = other RNA
ttgtttgtgcagctgctttattc

SEQ ID NO: 1543 - RNA, 23 nt, synthetic construct
  source 1..23: mol_type = other RNA
agctcctctgacagagttacttc

SEQ ID NO: 1544 - RNA, 23 nt, synthetic construct
  source 1..23: mol_type = other RNA
ctgacagagttacttcactctag

SEQ ID NO: 1545 - RNA, 23 nt, synthetic construct
  source 1..23: mol_type = other RNA
agagttacttcactctaggaatg

SEQ ID NO: 1546 - RNA, 23 nt, synthetic construct
  source 1..23: mol_type = other RNA
ctgaggacaagccacaagattac

SEQ ID NO: 1547 - RNA, 23 nt, synthetic construct
  source 1..23: mol_type = other RNA
gccacaagattacaagaaacggc

SEQ ID NO: 1548 - RNA, 23 nt, synthetic construct
  source 1..23: mol_type = other RNA
ccacaagattacaagaaacggct

SEQ ID NO: 1549 - RNA, 23 nt, synthetic construct
  source 1..23: mol_type = other RNA
cacaagattacaagaaacggctt

SEQ ID NO: 1550 - RNA, 23 nt, synthetic construct
  source 1..23: mol_type = other RNA
acaagattacaagaaacggcttt

SEQ ID NO: 1551 - RNA, 23 nt, synthetic construct
  source 1..23: mol_type = other RNA
gattacaagaaacggctttcagt

SEQ ID NO: 1552 - RNA, 23 nt, synthetic construct
  source 1..23: mol_type = other RNA
attacaagaaacggctttcagtt

SEQ ID NO: 1553 - RNA, 23 nt, synthetic construct
  source 1..23: mol_type = other RNA
agaaacggctttcagttgagctg

SEQ ID NO: 1554 - RNA, 23 nt, synthetic construct
  source 1..23: mol_type = other RNA
cggctttcagttgagctgaccag

SEQ ID NO: 1555 - RNA, 23 nt, synthetic construct
  source 1..23: mol_type = other RNA
atcttggacttgatattggtgcc

SEQ ID NO: 1556 - RNA, 23 nt, synthetic construct
  source 1..23: mol_type = other RNA
gatatcgccaggatgatcctagc

SEQ ID NO: 1557 - RNA, 23 nt, synthetic construct
  source 1..23: mol_type = other RNA
gccaccaccctggtgctgactat

SEQ ID NO: 1558 - RNA, 23 nt, synthetic construct
  source 1..23: mol_type = other RNA
caatcagctggcctggtttgata

SEQ ID NO: 1559 - RNA, 23 nt, synthetic construct
  source 1..23: mol_type = other RNA
aatcagctggcctggtttgatac

SEQ ID NO: 1560 - RNA, 23 nt, synthetic construct
  source 1..23: mol_type = other RNA
aatcagctggcctggtttgatac

SEQ ID NO: 1561 - RNA, 23 nt, synthetic construct
  source 1..23: mol_type = other RNA
agctggcctggtttgatactgac

SEQ ID NO: 1562 - RNA, 23 nt, synthetic construct
  source 1..23: mol_type = other RNA
acctgtaaatcatcctttaggta

SEQ ID NO: 1563 - RNA, 23 nt, synthetic construct
  source 1..23: mol_type = other RNA
cctgtaaatcatcctttaggtaa

SEQ ID NO: 1564 - RNA, 23 nt, synthetic construct
  source 1..23: mol_type = other RNA
agaaagacttggttggtagggtg

SEQ ID NO: 1565 - RNA, 23 nt, synthetic construct
  source 1..23: mol_type = other RNA
atactttgaaaggagatgtcttg

SEQ ID NO: 1566 - RNA, 23 nt, synthetic construct
  source 1..23: mol_type = other RNA
atactttgaaaggagatgtcttg

SEQ ID NO: 1567 - RNA, 23 nt, synthetic construct
  source 1..23: mol_type = other RNA
tgttctcagatttctggttgtta

SEQ ID NO: 1568 - RNA, 23 nt, synthetic construct
  source 1..23: mol_type = other RNA
gttctcagatttctggttgttat

SEQ ID NO: 1569 - RNA, 23 nt, synthetic construct
  source 1..23: mol_type = other RNA
gttctcagatttctggttgttat

SEQ ID NO: 1570 - RNA, 23 nt, synthetic construct
  source 1..23: mol_type = other RNA
ttctcagatttctggttgttatg

SEQ ID NO: 1571 - RNA, 23 nt, synthetic construct
  source 1..23: mol_type = other RNA
tggttgttatgtgatcatgtgtg

SEQ ID NO: 1572 - RNA, 23 nt, synthetic construct
  source 1..23: mol_type = other RNA
ggttgttatgtgatcatgtgtgg

SEQ ID NO: 1573 - RNA, 23 nt, synthetic construct
  source 1..23: mol_type = other RNA
atgtgatcatgtgtggaagttat

SEQ ID NO: 1574 - RNA, 23 nt, synthetic construct
  source 1..23: mol_type = other RNA
gtgatcatgtgtggaagttatta

SEQ ID NO: 1575 - RNA, 23 nt, synthetic construct
  source 1..23: mol_type = other RNA
tgatcatgtgtggaagttattaa

SEQ ID NO: 1576 - RNA, 23 nt, synthetic construct
  source 1..23: mol_type = other RNA
tttgcaacttaatactcaaatga

SEQ ID NO: 1577 - RNA, 23 nt, synthetic construct
  source 1..23: mol_type = other RNA
agcctttctctctttatacagct

SEQ ID NO: 1578 - RNA, 23 nt, synthetic construct
  source 1..23: mol_type = other RNA
tctttatacagctgtattgtctg

SEQ ID NO: 1579 - RNA, 23 nt, synthetic construct
  source 1..23: mol_type = other RNA
tctttatacagctgtattgtctg

SEQ ID NO: 1580 - RNA, 23 nt, synthetic construct
  source 1..23: mol_type = other RNA
gtattgtctgaacttgcattgtg

SEQ ID NO: 1581 - RNA, 23 nt, synthetic construct
  source 1..23: mol_type = other RNA
gattggcctgtagagttgctgag

SEQ ID NO: 1582 - RNA, 23 nt, synthetic construct
  source 1..23: mol_type = other RNA
aaagtgcctgacacactaaccaa

SEQ ID NO: 1583 - RNA, 23 nt, synthetic construct
  source 1..23: mol_type = other RNA
gcctgacacactaaccaagctga

SEQ ID NO: 1584 - RNA, 23 nt, synthetic construct
  source 1..23: mol_type = other RNA
actaaccaagctgagtttcctat

SEQ ID NO: 1585 - RNA, 23 nt, synthetic construct
  source 1..23: mol_type = other RNA
caagctgagtttcctatgggaac

SEQ ID NO: 1586 - RNA, 23 nt, synthetic construct
  source 1..23: mol_type = other RNA
agtttcctatgggaacaattgaa

SEQ ID NO: 1587 - RNA, 23 nt, synthetic construct
  source 1..23: mol_type = other RNA
tggtcgaggagtaacaatacaaa

SEQ ID NO: 1588 - RNA, 23 nt, synthetic construct
  source 1..23: mol_type = other RNA
tggtcgaggagtaacaatacaaa

SEQ ID NO: 1589 - RNA, 23 nt, synthetic construct
  source 1..23: mol_type = other RNA
ttatcaaaccctagccttgcttg

SEQ ID NO: 1590 - RNA, 23 nt, synthetic construct
  source 1..23: mol_type = other RNA
actttgcttgctttgaagtagct

SEQ ID NO: 1591 - RNA, 23 nt, synthetic construct
  source 1..23: mol_type = other RNA
tttgcttgctttgaagtagctct

SEQ ID NO: 1592 - RNA, 23 nt, synthetic construct
  source 1..23: mol_type = other RNA
ttgcttgctttgaagtagctctt

SEQ ID NO: 1593 - RNA, 23 nt, synthetic construct
  source 1..23: mol_type = other RNA
ttaagtctctcgtagtgttaagt

SEQ ID NO: 1594 - RNA, 23 nt, synthetic construct
  source 1..23: mol_type = other RNA
agtctctcgtagtgttaagttat

SEQ ID NO: 1595 - RNA, 23 nt, synthetic construct
  source 1..23: mol_type = other RNA
gtctctcgtagtgttaagttata

SEQ ID NO: 1596 - RNA, 23 nt, synthetic construct
  source 1..23: mol_type = other RNA
gtctctcgtagtgttaagttata

SEQ ID NO: 1597 - RNA, 23 nt, synthetic construct
  source 1..23: mol_type = other RNA
ctctcgtagtgttaagttatagt

SEQ ID NO: 1598 - RNA, 23 nt, synthetic construct
  source 1..23: mol_type = other RNA
ctcgtagtgttaagttatagtga

SEQ ID NO: 1599 - RNA, 23 nt, synthetic construct
  source 1..23: mol_type = other RNA
cgtagtgttaagttatagtgaat

SEQ ID NO: 1600 - RNA, 23 nt, synthetic construct
  source 1..23: mol_type = other RNA
tagtgaatactgctacagcaatt

SEQ ID NO: 1601 - RNA, 23 nt, synthetic construct
  source 1..23: mol_type = other RNA
tactgctacagcaatttctaatt

SEQ ID NO: 1602 - RNA, 23 nt, synthetic construct
  source 1..23: mol_type = other RNA
aagaattgagtaatggtgtagaa

SEQ ID NO: 1603 - RNA, 23 nt, synthetic construct
  source 1..23: mol_type = other RNA
aattgagtaatggtgtagaacac

SEQ ID NO: 1604 - RNA, 23 nt, synthetic construct
  source 1..23: mol_type = other RNA
ttgagtaatggtgtagaacacta

SEQ ID NO: 1605 - RNA, 23 nt, synthetic construct
  source 1..23: mol_type = other RNA
tgagtaatggtgtagaacactaa

SEQ ID NO: 1606 - RNA, 23 nt, synthetic construct
  source 1..23: mol_type = other RNA
agtaatggtgtagaacactaatt

SEQ ID NO: 1607 - RNA, 23 nt, synthetic construct
  source 1..23: mol_type = other RNA
taatggtgtagaacactaattca

SEQ ID NO: 1608 - RNA, 23 nt, synthetic construct
  source 1..23: mol_type = other RNA
aatggtgtagaacactaattcat

SEQ ID NO: 1609 - RNA, 23 nt, synthetic construct
  source 1..23: mol_type = other RNA
atggtgtagaacactaattcata

SEQ ID NO: 1610 - RNA, 23 nt, synthetic construct
  source 1..23: mol_type = other RNA
tggtgtagaacactaattcataa

SEQ ID NO: 1611 - RNA, 23 nt, synthetic construct
  source 1..23: mol_type = other RNA
ggtgtagaacactaattcataat

SEQ ID NO: 1612 - RNA, 23 nt, synthetic construct
  source 1..23: mol_type = other RNA
gtgtagaacactaattcataatc

SEQ ID NO: 1613 - RNA, 23 nt, synthetic construct
  source 1..23: mol_type = other RNA
tgtagaacactaattcataatca

SEQ ID NO: 1614 - RNA, 23 nt, synthetic construct
  source 1..23: mol_type = other RNA
gtagaacactaattcataatcac

SEQ ID NO: 1615 - RNA, 23 nt, synthetic construct
  source 1..23: mol_type = other RNA
gtagaacactaattcataatcac

SEQ ID NO: 1616 - RNA, 23 nt, synthetic construct
  source 1..23: mol_type = other RNA
tagaacactaattcataatcact

SEQ ID NO: 1617 - RNA, 23 nt, synthetic construct
  source 1..23: mol_type = other RNA
agaacactaattcataatcactc

SEQ ID NO: 1618 - RNA, 23 nt, synthetic construct
  source 1..23: mol_type = other RNA
aaatggtccaattagtttccttt

SEQ ID NO: 1619 - RNA, 23 nt, synthetic construct
  source 1..23: mol_type = other RNA
tatttgggatatgtatgggtagg

SEQ ID NO: 1620 - RNA, 23 nt, synthetic construct
  source 1..23: mol_type = other RNA
tatgtatgggtagggtaaatcag

SEQ ID NO: 1621 - RNA, 23 nt, synthetic construct
  source 1..23: mol_type = other RNA
gtatgggtagggtaaatcagtaa

SEQ ID NO: 1622 - RNA, 23 nt, synthetic construct
  source 1..23: mol_type = other RNA
gggtagggtaaatcagtaagagg

SEQ ID NO: 1623 - RNA, 23 nt, synthetic construct
  source 1..23: mol_type = other RNA
gtagggtaaatcagtaagaggtg

SEQ ID NO: 1624 - RNA, 23 nt, synthetic construct
  source 1..23: mol_type = other RNA
tagggtaaatcagtaagaggtgt

SEQ ID NO: 1625 - RNA, 23 nt, synthetic construct
  source 1..23: mol_type = other RNA
gggtaaatcagtaagaggtgtta

SEQ ID NO: 1626 - RNA, 23 nt, synthetic construct
  source 1..23: mol_type = other RNA
gtaaatcagtaagaggtgttatt

SEQ ID NO: 1627 - RNA, 23 nt, synthetic construct
  source 1..23: mol_type = other RNA
taaatcagtaagaggtgttattt

SEQ ID NO: 1628 - RNA, 23 nt, synthetic construct
  source 1..23: mol_type = other RNA
atcagtaagaggtgttatttgga

SEQ ID NO: 1629 - RNA, 23 nt, synthetic construct
  source 1..23: mol_type = other RNA
agttggacatggccatggaacca

SEQ ID NO: 1630 - RNA, 23 nt, synthetic construct
  source 1..23: mol_type = other RNA
cctggactctggaatccattctg

SEQ ID NO: 1631 - RNA, 23 nt, synthetic construct
  source 1..23: mol_type = other RNA
ttctctgagtggtaaaggcaatc

SEQ ID NO: 1632 - RNA, 23 nt, synthetic construct
  source 1..23: mol_type = other RNA
actcaagaacaagtagctgatat

SEQ ID NO: 1633 - RNA, 23 nt, synthetic construct
  source 1..23: mol_type = other RNA
agtagctgatattgatggacagt

SEQ ID NO: 1634 - RNA, 23 nt, synthetic construct
  source 1..23: mol_type = other RNA
gtagctgatattgatggacagta

SEQ ID NO: 1635 - RNA, 23 nt, synthetic construct
  source 1..23: mol_type = other RNA
agctgatattgatggacagtatg

SEQ ID NO: 1636 - RNA, 23 nt, synthetic construct
  source 1..23: mol_type = other RNA
attgatggacagtatgcaatgac

SEQ ID NO: 1637 - RNA, 23 nt, synthetic construct
  source 1..23: mol_type = other RNA
acagtatgcaatgactcgagctc

SEQ ID NO: 1638 - RNA, 23 nt, synthetic construct
  source 1..23: mol_type = other RNA
cgagctcagagggtacgagctgc

SEQ ID NO: 1639 - RNA, 23 nt, synthetic construct
  source 1..23: mol_type = other RNA
agctcagagggtacgagctgcta

SEQ ID NO: 1640 - RNA, 23 nt, synthetic construct
  source 1..23: mol_type = other RNA
tcagagggtacgagctgctatgt

SEQ ID NO: 1641 - RNA, 23 nt, synthetic construct
  source 1..23: mol_type = other RNA
ctgctatgttccctgagacatta

SEQ ID NO: 1642 - RNA, 23 nt, synthetic construct
  source 1..23: mol_type = other RNA
ccagcgtttggctgaaccatcac

SEQ ID NO: 1643 - RNA, 23 nt, synthetic construct
  source 1..23: mol_type = other RNA
gatgctgaaacatgcagttgtaa

SEQ ID NO: 1644 - RNA, 23 nt, synthetic construct
  source 1..23: mol_type = other RNA
aacatgcagttgtaaacttgatt

SEQ ID NO: 1645 - RNA, 23 nt, synthetic construct
  source 1..23: mol_type = other RNA
atgcagttgtaaacttgattaac

SEQ ID NO: 1646 - RNA, 23 nt, synthetic construct
  source 1..23: mol_type = other RNA
cttgattaactatcaagatgatg

SEQ ID NO: 1647 - RNA, 23 nt, synthetic construct
  source 1..23: mol_type = other RNA
tgcagaacttgccacacgtgcaa

SEQ ID NO: 1648 - RNA, 23 nt, synthetic construct
  source 1..23: mol_type = other RNA
gccacacgtgcaatccctgaact

SEQ ID NO: 1649 - RNA, 23 nt, synthetic construct
  source 1..23: mol_type = other RNA
acgtgcaatccctgaactgacaa

SEQ ID NO: 1650 - RNA, 23 nt, synthetic construct
  source 1..23: mol_type = other RNA
acgaggaccaggtggtggttaat

SEQ ID NO: 1651 - RNA, 23 nt, synthetic construct
  source 1..23: mol_type = other RNA
aggtggtggttaataaggctgca

SEQ ID NO: 1652 - RNA, 23 nt, synthetic construct
  source 1..23: mol_type = other RNA
catgcagaatacaaatgatgtag

SEQ ID NO: 1653 - RNA, 23 nt, synthetic construct
  source 1..23: mol_type = other RNA
gcagaatacaaatgatgtagaaa

SEQ ID NO: 1654 - RNA, 23 nt, synthetic construct
  source 1..23: mol_type = other RNA
aatgatgtagaaacagctcgttg

SEQ ID NO: 1655 - RNA, 23 nt, synthetic construct
  source 1..23: mol_type = other RNA
accttgcataacctttcccatca

SEQ ID NO: 1656 - RNA, 23 nt, synthetic construct
  source 1..23: mol_type = other RNA
ccttgcataacctttcccatcat

SEQ ID NO: 1657 - RNA, 23 nt, synthetic construct
  source 1..23: mol_type = other RNA
ggccatctttaagtctggaggca

SEQ ID NO: 1658 - RNA, 23 nt, synthetic construct
  source 1..23: mol_type = other RNA
atgccattacaactctccacaac

SEQ ID NO: 1659 - RNA, 23 nt, synthetic construct
  source 1..23: mol_type = other RNA
tggttgccttgctcaacaaaaca

SEQ ID NO: 1660 - RNA, 23 nt, synthetic construct
  source 1..23: mol_type = other RNA
aaattcttggctattacgacaga

SEQ ID NO: 1661 - RNA, 23 nt, synthetic construct
  source 1..23: mol_type = other RNA
gtaaatataatgaggacctatac

SEQ ID NO: 1662 - RNA, 23 nt, synthetic construct
  source 1..23: mol_type = other RNA
taaatataatgaggacctatact

SEQ ID NO: 1663 - RNA, 23 nt, synthetic construct
  source 1..23: mol_type = other RNA
aagcagagtgctgaaggtgctat

SEQ ID NO: 1664 - RNA, 23 nt, synthetic construct
  source 1..23: mol_type = other RNA
gcttctgggttcagatgatataa

SEQ ID NO: 1665 - RNA, 23 nt, synthetic construct
  source 1..23: mol_type = other RNA
cagatgatataaatgtggtcacc

SEQ ID NO: 1666 - RNA, 23 nt, synthetic construct
  source 1..23: mol_type = other RNA
ctggaattctttctaacctcact

SEQ ID NO: 1667 - RNA, 23 nt, synthetic construct
  source 1..23: mol_type = other RNA
attctttctaacctcacttgcaa

SEQ ID NO: 1668 - RNA, 23 nt, synthetic construct
  source 1..23: mol_type = other RNA
ctttctaacctcacttgcaataa

SEQ ID NO: 1669 - RNA, 23 nt, synthetic construct
  source 1..23: mol_type = other RNA
tttctaacctcacttgcaataat

SEQ ID NO: 1670 - RNA, 23 nt, synthetic construct
  source 1..23: mol_type = other RNA
ccaagtgggtggtatagaggctc

SEQ ID NO: 1671 - RNA, 23 nt, synthetic construct
  source 1..23: mol_type = other RNA
agtgggtggtatagaggctcttg

SEQ ID NO: 1672 - RNA, 23 nt, synthetic construct
  source 1..23: mol_type = other RNA
tgagcctgccatctgtgctcttc

SEQ ID NO: 1673 - RNA, 23 nt, synthetic construct
  source 1..23: mol_type = other RNA
gagcctgccatctgtgctcttcg

SEQ ID NO: 1674 - RNA, 23 nt, synthetic construct
  source 1..23: mol_type = other RNA
gccatctgtgctcttcgtcatct

SEQ ID NO: 1675 - RNA, 23 nt, synthetic construct
  source 1..23: mol_type = other RNA
gtgctcttcgtcatctgaccagc

SEQ ID NO: 1676 - RNA, 23 nt, synthetic construct
  source 1..23: mol_type = other RNA
gaatgcagttcgccttcactatg

SEQ ID NO: 1677 - RNA, 23 nt, synthetic construct
  source 1..23: mol_type = other RNA
tgtggttaagctcttacacccac

SEQ ID NO: 1678 - RNA, 23 nt, synthetic construct
  source 1..23: mol_type = other RNA
tactgttggattgattcgaaatc

SEQ ID NO: 1679 - RNA, 23 nt, synthetic construct
  source 1..23: mol_type = other RNA
actgttggattgattcgaaatct

SEQ ID NO: 1680 - RNA, 23 nt, synthetic construct
  source 1..23: mol_type = other RNA
tgcgtgagcagggtgccattcca

SEQ ID NO: 1681 - RNA, 23 nt, synthetic construct
  source 1..23: mol_type = other RNA
ttccacgactagttcagttgctt

SEQ ID NO: 1682 - RNA, 23 nt, synthetic construct
  source 1..23: mol_type = other RNA
agttcagttgcttgttcgtgcac

SEQ ID NO: 1683 - RNA, 23 nt, synthetic construct
  source 1..23: mol_type = other RNA
gttcagttgcttgttcgtgcaca

SEQ ID NO: 1684 - RNA, 23 nt, synthetic construct
  source 1..23: mol_type = other RNA
tcagttgcttgttcgtgcacatc

SEQ ID NO: 1685 - RNA, 23 nt, synthetic construct
  source 1..23: mol_type = other RNA
atcagaggactaaataccattcc

SEQ ID NO: 1686 - RNA, 23 nt, synthetic construct
  source 1..23: mol_type = other RNA
aggactaaataccattccattgt

SEQ ID NO: 1687 - RNA, 23 nt, synthetic construct
  source 1..23: mol_type = other RNA
taccattccattgtttgtgcagc

SEQ ID NO: 1688 - RNA, 23 nt, synthetic construct
  source 1..23: mol_type = other RNA
ccattccattgtttgtgcagctg

SEQ ID NO: 1689 - RNA, 23 nt, synthetic construct
  source 1..23: mol_type = other RNA
cattccattgtttgtgcagctgc

SEQ ID NO: 1690 - RNA, 23 nt, synthetic construct
  source 1..23: mol_type = other RNA
ttccattgtttgtgcagctgctt

SEQ ID NO: 1691 - RNA, 23 nt, synthetic construct
  source 1..23: mol_type = other RNA
gagccacagctcctctgacagag

SEQ ID NO: 1692 - RNA, 23 nt, synthetic construct
  source 1..23: mol_type = other RNA
acaagccacaagattacaagaaa

SEQ ID NO: 1693 - RNA, 23 nt, synthetic construct
  source 1..23: mol_type = other RNA
agccacaagattacaagaaacgg

SEQ ID NO: 1694 - RNA, 23 nt, synthetic construct
  source 1..23: mol_type = other RNA
acaagattacaagaaacggcttt

SEQ ID NO: 1695 - RNA, 23 nt, synthetic construct
  source 1..23: mol_type = other RNA
agattacaagaaacggctttcag

SEQ ID NO: 1696 - RNA, 23 nt, synthetic construct
  source 1..23: mol_type = other RNA
acggctttcagttgagctgacca

SEQ ID NO: 1697 - RNA, 23 nt, synthetic construct
  source 1..23: mol_type = other RNA
gttgagctgaccagctctctctt

SEQ ID NO: 1698 - RNA, 23 nt, synthetic construct
  source 1..23: mol_type = other RNA
cagagccaatggcttggaatgag

SEQ ID NO: 1699 - RNA, 23 nt, synthetic construct
  source 1..23: mol_type = other RNA
tgctgatcttggacttgatattg

SEQ ID NO: 1700 - RNA, 23 nt, synthetic construct
  source 1..23: mol_type = other RNA
cctggtttgatactgacctgtaa

SEQ ID NO: 1701 - RNA, 23 nt, synthetic construct
  source 1..23: mol_type = other RNA
ggtttgatactgacctgtaaatc

SEQ ID NO: 1702 - RNA, 23 nt, synthetic construct
  source 1..23: mol_type = other RNA
taggctatttgtaaatctgccac

SEQ ID NO: 1703 - RNA, 23 nt, synthetic construct
  source 1..23: mol_type = other RNA
gatttctggttgttatgtgatca

SEQ ID NO: 1704 - RNA, 23 nt, synthetic construct
  source 1..23: mol_type = other RNA
gtgatcatgtgtggaagttatta

SEQ ID NO: 1705 - RNA, 23 nt, synthetic construct
  source 1..23: mol_type = other RNA
cttaatactcaaatgagtaacat

SEQ ID NO: 1706 - RNA, 23 nt, synthetic construct
  source 1..23: mol_type = other RNA
gtattgtctgaacttgcattgtg

SEQ ID NO: 1707 - RNA, 23 nt, synthetic construct
  source 1..23: mol_type = other RNA
ctcagaaagtgcctgacacacta

SEQ ID NO: 1708 - RNA, 23 nt, synthetic construct
  source 1..23: mol_type = other RNA
cagaaagtgcctgacacactaac

SEQ ID NO: 1709 - RNA, 23 nt, synthetic construct
  source 1..23: mol_type = other RNA
gtgcctgacacactaaccaagct

SEQ ID NO: 1710 - RNA, 23 nt, synthetic construct
  source 1..23: mol_type = other RNA
tatgggaacaattgaagtaaact

SEQ ID NO: 1711 - RNA, 23 nt, synthetic construct
  source 1..23: mol_type = other RNA
gaatggatcacaagatggaattt

SEQ ID NO: 1712 - RNA, 23 nt, synthetic construct
  source 1..23: mol_type = other RNA
aatttatcaaaccctagccttgc

SEQ ID NO: 1713 - RNA, 23 nt, synthetic construct
  source 1..23: mol_type = other RNA
aatatctgtaatggtactgactt

SEQ ID NO: 1714 - RNA, 23 nt, synthetic construct
  source 1..23: mol_type = other RNA
ctttgcttgctttgaagtagctc

SEQ ID NO: 1715 - RNA, 23 nt, synthetic construct
  source 1..23: mol_type = other RNA
gtagtgttaagttatagtgaata

SEQ ID NO: 1716 - RNA, 23 nt, synthetic construct
  source 1..23: mol_type = other RNA
agtgttaagttatagtgaatact

SEQ ID NO: 1717 - RNA, 23 nt, synthetic construct
  source 1..23: mol_type = other RNA
gagtaatggtgtagaacactaat

SEQ ID NO: 1718 - RNA, 23 nt, synthetic construct
  source 1..23: mol_type = other RNA
gtaatggtgtagaacactaattc

SEQ ID NO: 1719 - RNA, 23 nt, synthetic construct
  source 1..23: mol_type = other RNA
cactaattcataatcactctaat

SEQ ID NO: 1720 - RNA, 23 nt, synthetic construct
  source 1..23: mol_type = other RNA
tatttgggatatgtatgggtagg

SEQ ID NO: 1721 - RNA, 23 nt, synthetic construct
  source 1..23: mol_type = other RNA
tagggtaaatcagtaagaggtgt

SEQ ID NO: 1722 - RNA, 23 nt, synthetic construct
  source 1..23: mol_type = other RNA
gggtaaatcagtaagaggtgtta

SEQ ID NO: 1723 - RNA, 23 nt, synthetic construct
  source 1..23: mol_type = other RNA
ggtaaatcagtaagaggtgttat

SEQ ID NO: 1724 - RNA, 23 nt, synthetic construct
  source 1..23: mol_type = other RNA
taaatcagtaagaggtgttattt

SEQ ID NO: 1725 - RNA, 21 nt, synthetic construct
  source 1..21: mol_type = other RNA
actctggaatccattctggta

SEQ ID NO: 1726 - RNA, 21 nt, synthetic construct
  source 1..21: mol_type = other RNA
ctctggaatccattctggtga

SEQ ID NO: 1727 - RNA, 21 nt, synthetic construct
  source 1..21: mol_type = other RNA
tgctcatcccactaatgtcca

SEQ ID NO: 1728 - RNA, 21 nt, synthetic construct
  source 1..21: mol_type = other RNA
ctcatcccactaatgtccaga

SEQ ID NO: 1729 - RNA, 21 nt, synthetic construct
  source 1..21: mol_type = other RNA
ccatgcagaatacaaatgata

SEQ ID NO: 1730 - RNA, 21 nt, synthetic construct
  source 1..21: mol_type = other RNA
catgcagaatacaaatgatga

SEQ ID NO: 1731 - RNA, 21 nt, synthetic construct
  source 1..21: mol_type = other RNA
agaaggagctaaaatggcaga

SEQ ID NO: 1732 - RNA, 21 nt, synthetic construct
  source 1..21: mol_type = other RNA
ggagctaaaatggcagtgcga

SEQ ID NO: 1733 - RNA, 21 nt, synthetic construct
  source 1..21: mol_type = other RNA
tactggccatctttaagtcta

SEQ ID NO: 1734 - RNA, 21 nt, synthetic construct
  source 1..21: mol_type = other RNA
actggccatctttaagtctga

SEQ ID NO: 1735 - RNA, 21 nt, synthetic construct
  source 1..21: mol_type = other RNA
ctggccatctttaagtctgga

SEQ ID NO: 1736 - RNA, 21 nt, synthetic construct
  source 1..21: mol_type = other RNA
taacctcacttgcaataatta

SEQ ID NO: 1737 - RNA, 21 nt, synthetic construct
  source 1..21: mol_type = other RNA
aacctcacttgcaataattaa

SEQ ID NO: 1738 - RNA, 21 nt, synthetic construct
  source 1..21: mol_type = other RNA
gccatctgtgctcttcgtcaa

SEQ ID NO: 1739 - RNA, 21 nt, synthetic construct
  source 1..21: mol_type = other RNA
ccatctgtgctcttcgtcata

SEQ ID NO: 1740 - RNA, 21 nt, synthetic construct
  source 1..21: mol_type = other RNA
atctgtgctcttcgtcatcta

SEQ ID NO: 1741 - RNA, 21 nt, synthetic construct
  source 1..21: mol_type = other RNA
tctgtgctcttcgtcatctga

SEQ ID NO: 1742 - RNA, 21 nt, synthetic construct
  source 1..21: mol_type = other RNA
ctgtgctcttcgtcatctgaa

SEQ ID NO: 1743 - RNA, 21 nt, synthetic construct
  source 1..21: mol_type = other RNA
tgtgctcttcgtcatctgaca

SEQ ID NO: 1744 - RNA, 21 nt, synthetic construct
  source 1..21: mol_type = other RNA
gtgctcttcgtcatctgacca

SEQ ID NO: 1745 - RNA, 21 nt, synthetic construct
  source 1..21: mol_type = other RNA
actgttggattgattcgaaaa

SEQ ID NO: 1746 - RNA, 21 nt, synthetic construct
  source 1..21: mol_type = other RNA
aaataccattccattgtttga

SEQ ID NO: 1747 - RNA, 21 nt, synthetic construct
  source 1..21: mol_type = other RNA
taccattccattgtttgtgca

SEQ ID NO: 1748 - RNA, 21 nt, synthetic construct
  source 1..21: mol_type = other RNA
ccattccattgtttgtgcaga

SEQ ID NO: 1749 - RNA, 21 nt, synthetic construct
  source 1..21: mol_type = other RNA
gtcctctgtgaacttgctcaa

SEQ ID NO: 1750 - RNA, 21 nt, synthetic construct
  source 1..21: mol_type = other RNA
tcctctgtgaacttgctcaga

SEQ ID NO: 1751 - RNA, 21 nt, synthetic construct
  source 1..21: mol_type = other RNA
atcgttcttttcactctggta

SEQ ID NO: 1752 - RNA, 21 nt, synthetic construct
  source 1..21: mol_type = other RNA
tcgttcttttcactctggtga

SEQ ID NO: 1753 - RNA, 21 nt, synthetic construct
  source 1..21: mol_type = other RNA
tggtgctgactatccagttga

SEQ ID NO: 1754 - RNA, 21 nt, synthetic construct
  source 1..21: mol_type = other RNA
gctgactatccagttgatgga

SEQ ID NO: 1755 - RNA, 21 nt, synthetic construct
  source 1..21: mol_type = other RNA
ctgactatccagttgatggga

SEQ ID NO: 1756 - RNA, 21 nt, synthetic construct
  source 1..21: mol_type = other RNA
gactatccagttgatgggcta

SEQ ID NO: 1757 - RNA, 21 nt, synthetic construct
  source 1..21: mol_type = other RNA
attggcctgtagagttgctga

SEQ ID NO: 1758 - RNA, 21 nt, synthetic construct
  source 1..21: mol_type = other RNA
ggctggtatctcagaaagtga

SEQ ID NO: 1759 - RNA, 21 nt, synthetic construct
  source 1..21: mol_type = other RNA
gctggtatctcagaaagtgca

SEQ ID NO: 1760 - RNA, 21 nt, synthetic construct
  source 1..21: mol_type = other RNA
tggtatctcagaaagtgccta

SEQ ID NO: 1761 - RNA, 21 nt, synthetic construct
  source 1..21: mol_type = other RNA
ctgacacactaaccaagctga

SEQ ID NO: 1762 - RNA, 21 nt, synthetic construct
  source 1..21: mol_type = other RNA
aaccaagctgagtttcctata

SEQ ID NO: 1763 - RNA, 21 nt, synthetic construct
  source 1..21: mol_type = other RNA
ccaagctgagtttcctatgga

SEQ ID NO: 1764 - RNA, 21 nt, synthetic construct
  source 1..21: mol_type = other RNA
caagctgagtttcctatggga

SEQ ID NO: 1765 - RNA, 21 nt, synthetic construct
  source 1..21: mol_type = other RNA
aagctgagtttcctatgggaa

SEQ ID NO: 1766 - RNA, 21 nt, synthetic construct
  source 1..21: mol_type = other RNA
agctgagtttcctatgggaaa

SEQ ID NO: 1767 - RNA, 21 nt, synthetic construct
  source 1..21: mol_type = other RNA
ttgttctggtcctttttggta

SEQ ID NO: 1768 - RNA, 21 nt, synthetic construct
  source 1..21: mol_type = other RNA
tgttctggtcctttttggtca

SEQ ID NO: 1769 - RNA, 21 nt, synthetic construct
  source 1..21: mol_type = other RNA
gttctggtcctttttggtcga

SEQ ID NO: 1770 - RNA, 21 nt, synthetic construct
  source 1..21: mol_type = other RNA
ttctggtcctttttggtcgaa

SEQ ID NO: 1771 - RNA, 21 nt, synthetic construct
  source 1..21: mol_type = other RNA
tctggtcctttttggtcgaga

SEQ ID NO: 1772 - RNA, 21 nt, synthetic construct
  source 1..21: mol_type = other RNA
ctggtcctttttggtcgagga

SEQ ID NO: 1773 - RNA, 21 nt, synthetic construct
  source 1..21: mol_type = other RNA
gaggagtaacaatacaaatga

SEQ ID NO: 1774 - RNA, 21 nt, synthetic construct
  source 1..21: mol_type = other RNA
atggtgtagaacactaattca

SEQ ID NO: 1775 - RNA, 21 nt, synthetic construct
  source 1..21: mol_type = other RNA
ggtgtagaacactaattcata

SEQ ID NO: 1776 - RNA, 21 nt, synthetic construct
  source 1..21: mol_type = other RNA
gtgtagaacactaattcataa

SEQ ID NO: 1777 - RNA, 21 nt, synthetic construct
  source 1..21: mol_type = other RNA
tagaacactaattcataatca

SEQ ID NO: 1778 - RNA, 21 nt, synthetic construct
  source 1..21: mol_type = other RNA
gaacactaattcataatcaca

SEQ ID NO: 1779 - RNA, 21 nt, synthetic construct
  source 1..21: mol_type = other RNA
tgcttaaaataagcaggtgga

SEQ ID NO: 1780 - RNA, 21 nt, synthetic construct
  source 1..21: mol_type = other RNA
taagcaggtggatctatttca

SEQ ID NO: 1781 - RNA, 21 nt, synthetic construct
  source 1..21: mol_type = other RNA
agcaggtggatctatttcata

SEQ ID NO: 1782 - RNA, 21 nt, synthetic construct
  source 1..21: mol_type = other RNA
gcaggtggatctatttcatga

SEQ ID NO: 1783 - RNA, 21 nt, synthetic construct
  source 1..21: mol_type = other RNA
ggtggatctatttcatgttta

SEQ ID NO: 1784 - RNA, 21 nt, synthetic construct
  source 1..21: mol_type = other RNA
gtggatctatttcatgtttta

SEQ ID NO: 1785 - RNA, 21 nt, synthetic construct
  source 1..21: mol_type = other RNA
ggatctatttcatgtttttga

SEQ ID NO: 1786 - RNA, 21 nt, synthetic construct
  source 1..21: mol_type = other RNA
gggtagggtaaatcagtaaga

SEQ ID NO: 1787 - RNA, 21 nt, synthetic construct
  source 1..21: mol_type = other RNA
gtagggtaaatcagtaagaga

SEQ ID NO: 1788 - RNA, 21 nt, synthetic construct
  source 1..21: mol_type = other RNA
tagggtaaatcagtaagagga

SEQ ID NO: 1789 - RNA, 21 nt, synthetic construct
  source 1..21: mol_type = other RNA
agggtaaatcagtaagaggta

SEQ ID NO: 1790 - RNA, 21 nt, synthetic construct
  source 1..21: mol_type = other RNA
ggtaaatcagtaagaggtgta

SEQ ID NO: 1791 - RNA, 21 nt, synthetic construct
  source 1..21: mol_type = other RNA
gtaaatcagtaagaggtgtta

SEQ ID NO: 1792 - RNA, 21 nt, synthetic construct
  source 1..21: mol_type = other RNA
ttaccagttgccttttatcca

SEQ ID NO: 1793 - RNA, 21 nt, synthetic construct
  source 1..21: mol_type = other RNA
taccagttgccttttatccca

SEQ ID NO: 1794 - RNA, 21 nt, synthetic construct
  source 1..21: mol_type = other RNA
tatcccaaagttgttgtaaca

SEQ ID NO: 1795 - RNA, 21 nt, synthetic construct
  source 1..21: mol_type = other RNA
cccaaagttgttgtaacctga

SEQ ID NO: 1796 - RNA, 21 nt, synthetic construct
  source 1..21: mol_type = other RNA
tactgttggattgattcgaaa

SEQ ID NO: 1797 - RNA, 23 nt, synthetic construct
  source 1..23: mol_type = other RNA
taccagaatggattccagagtcc

SEQ ID NO: 1798 - RNA, 23 nt, synthetic construct
  source 1..23: mol_type = other RNA
tcaccagaatggattccagagtc

SEQ ID NO: 1799 - RNA, 23 nt, synthetic construct
  source 1..23: mol_type = other RNA
tggacattagtgggatgagcagc

SEQ ID NO: 1800 - RNA, 23 nt, synthetic construct
  source 1..23: mol_type = other RNA
tctggacattagtgggatgagca

SEQ ID NO: 1801 - RNA, 23 nt, synthetic construct
  source 1..23: mol_type = other RNA
tatcatttgtattctgcatggta

SEQ ID NO: 1802 - RNA, 23 nt, synthetic construct
  source 1..23: mol_type = other RNA
tcatcatttgtattctgcatggt

SEQ ID NO: 1803 - RNA, 23 nt, synthetic construct
  source 1..23: mol_type = other RNA
tctgccattttagctccttcttg

SEQ ID NO: 1804 - RNA, 23 nt, synthetic construct
  source 1..23: mol_type = other RNA
tcgcactgccattttagctcctt

SEQ ID NO: 1805 - RNA, 23 nt, synthetic construct
  source 1..23: mol_type = other RNA
tagacttaaagatggccagtaag

SEQ ID NO: 1806 - RNA, 23 nt, synthetic construct
  source 1..23: mol_type = other RNA
tcagacttaaagatggccagtaa

SEQ ID NO: 1807 - RNA, 23 nt, synthetic construct
  source 1..23: mol_type = other RNA
tccagacttaaagatggccagta

SEQ ID NO: 1808 - RNA, 23 nt, synthetic construct
  source 1..23: mol_type = other RNA
taattattgcaagtgaggttaga

SEQ ID NO: 1809 - RNA, 23 nt, synthetic construct
  source 1..23: mol_type = other RNA
ttaattattgcaagtgaggttag

SEQ ID NO: 1810 - RNA, 23 nt, synthetic construct
  source 1..23: mol_type = other RNA
ttgacgaagagcacagatggcag

SEQ ID NO: 1811 - RNA, 23 nt, synthetic construct
  source 1..23: mol_type = other RNA
tatgacgaagagcacagatggca

SEQ ID NO: 1812 - RNA, 23 nt, synthetic construct
  source 1..23: mol_type = other RNA
tagatgacgaagagcacagatgg

SEQ ID NO: 1813 - RNA, 23 nt, synthetic construct
  source 1..23: mol_type = other RNA
tcagatgacgaagagcacagatg

SEQ ID NO: 1814 - RNA, 23 nt, synthetic construct
  source 1..23: mol_type = other RNA
ttcagatgacgaagagcacagat

SEQ ID NO: 1815 - RNA, 23 nt, synthetic construct
  source 1..23: mol_type = other RNA
tgtcagatgacgaagagcacaga

SEQ ID NO: 1816 - RNA, 23 nt, synthetic construct
  source 1..23: mol_type = other RNA
tggtcagatgacgaagagcacag

SEQ ID NO: 1817 - RNA, 23 nt, synthetic construct
  source 1..23: mol_type = other RNA
ttttcgaatcaatccaacagtag

SEQ ID NO: 1818 - RNA, 23 nt, synthetic construct
  source 1..23: mol_type = other RNA
tcaaacaatggaatggtatttag

SEQ ID NO: 1819 - RNA, 23 nt, synthetic construct
  source 1..23: mol_type = other RNA
tgcacaaacaatggaatggtatt

SEQ ID NO: 1820 - RNA, 23 nt, synthetic construct
  source 1..23: mol_type = other RNA
tctgcacaaacaatggaatggta

SEQ ID NO: 1821 - RNA, 23 nt, synthetic construct
  source 1..23: mol_type = other RNA
ttgagcaagttcacagaggaccc

SEQ ID NO: 1822 - RNA, 23 nt, synthetic construct
  source 1..23: mol_type = other RNA
tctgagcaagttcacagaggacc

SEQ ID NO: 1823 - RNA, 23 nt, synthetic construct
  source 1..23: mol_type = other RNA
taccagagtgaaaagaacgatag

SEQ ID NO: 1824 - RNA, 23 nt, synthetic construct
  source 1..23: mol_type = other RNA
tcaccagagtgaaaagaacgata

SEQ ID NO: 1825 - RNA, 23 nt, synthetic construct
  source 1..23: mol_type = other RNA
tcaactggatagtcagcaccagg

SEQ ID NO: 1826 - RNA, 23 nt, synthetic construct
  source 1..23: mol_type = other RNA
tccatcaactggatagtcagcac

SEQ ID NO: 1827 - RNA, 23 nt, synthetic construct
  source 1..23: mol_type = other RNA
tcccatcaactggatagtcagca

SEQ ID NO: 1828 - RNA, 23 nt, synthetic construct
  source 1..23: mol_type = other RNA
tagcccatcaactggatagtcag

SEQ ID NO: 1829 - RNA, 23 nt, synthetic construct
  source 1..23: mol_type = other RNA
tcagcaactctacaggccaatca

SEQ ID NO: 1830 - RNA, 23 nt, synthetic construct
  source 1..23: mol_type = other RNA
tcactttctgagataccagccca

SEQ ID NO: 1831 - RNA, 23 nt, synthetic construct
  source 1..23: mol_type = other RNA
tgcactttctgagataccagccc

SEQ ID NO: 1832 - RNA, 23 nt, synthetic construct
  source 1..23: mol_type = other RNA
taggcactttctgagataccagc

SEQ ID NO: 1833 - RNA, 23 nt, synthetic construct
  source 1..23: mol_type = other RNA
tcagcttggttagtgtgtcaggc

SEQ ID NO: 1834 - RNA, 23 nt, synthetic construct
  source 1..23: mol_type = other RNA
tataggaaactcagcttggttag

SEQ ID NO: 1835 - RNA, 23 nt, synthetic construct
  source 1..23: mol_type = other RNA
tccataggaaactcagcttggtt

SEQ ID NO: 1836 - RNA, 23 nt, synthetic construct
  source 1..23: mol_type = other RNA
tcccataggaaactcagcttggt

SEQ ID NO: 1837 - RNA, 23 nt, synthetic construct
  source 1..23: mol_type = other RNA
ttcccataggaaactcagcttgg

SEQ ID NO: 1838 - RNA, 23 nt, synthetic construct
  source 1..23: mol_type = other RNA
tttcccataggaaactcagcttg

SEQ ID NO: 1839 - RNA, 23 nt, synthetic construct
  source 1..23: mol_type = other RNA
taccaaaaaggaccagaacaaaa

SEQ ID NO: 1840 - RNA, 23 nt, synthetic construct
  source 1..23: mol_type = other RNA
tgaccaaaaaggaccagaacaaa

SEQ ID NO: 1841 - RNA, 23 nt, synthetic construct
  source 1..23: mol_type = other RNA
tcgaccaaaaaggaccagaacaa

SEQ ID NO: 1842 - RNA, 23 nt, synthetic construct
  source 1..23: mol_type = other RNA
ttcgaccaaaaaggaccagaaca

SEQ ID NO: 1843 - RNA, 23 nt, synthetic construct
  source 1..23: mol_type = other RNA
tctcgaccaaaaaggaccagaac

SEQ ID NO: 1844 - RNA, 23 nt, synthetic construct
  source 1..23: mol_type = other RNA
tcctcgaccaaaaaggaccagaa

SEQ ID NO: 1845 - RNA, 23 nt, synthetic construct
  source 1..23: mol_type = other RNA
tcatttgtattgttactcctcga

SEQ ID NO: 1846 - RNA, 23 nt, synthetic construct
  source 1..23: mol_type = other RNA
tgaattagtgttctacaccatta

SEQ ID NO: 1847 - RNA, 23 nt, synthetic construct
  source 1..23: mol_type = other RNA
tatgaattagtgttctacaccat

SEQ ID NO: 1848 - RNA, 23 nt, synthetic construct
  source 1..23: mol_type = other RNA
ttatgaattagtgttctacacca

SEQ ID NO: 1849 - RNA, 23 nt, synthetic construct
  source 1..23: mol_type = other RNA
tgattatgaattagtgttctaca

SEQ ID NO: 1850 - RNA, 23 nt, synthetic construct
  source 1..23: mol_type = other RNA
tgtgattatgaattagtgttcta

SEQ ID NO: 1851 - RNA, 23 nt, synthetic construct
  source 1..23: mol_type = other RNA
tccacctgcttattttaagcata

SEQ ID NO: 1852 - RNA, 23 nt, synthetic construct
  source 1..23: mol_type = other RNA
tgaaatagatccacctgcttatt

SEQ ID NO: 1853 - RNA, 23 nt, synthetic construct
  source 1..23: mol_type = other RNA
tatgaaatagatccacctgctta

SEQ ID NO: 1854 - RNA, 23 nt, synthetic construct
  source 1..23: mol_type = other RNA
tcatgaaatagatccacctgctt

SEQ ID NO: 1855 - RNA, 23 nt, synthetic construct
  source 1..23: mol_type = other RNA
taaacatgaaatagatccacctg

SEQ ID NO: 1856 - RNA, 23 nt, synthetic construct
  source 1..23: mol_type = other RNA
taaaacatgaaatagatccacct

SEQ ID NO: 1857 - RNA, 23 nt, synthetic construct
  source 1..23: mol_type = other RNA
tcaaaaacatgaaatagatccac

SEQ ID NO: 1858 - RNA, 23 nt, synthetic construct
  source 1..23: mol_type = other RNA
tcttactgatttaccctacccat

SEQ ID NO: 1859 - RNA, 23 nt, synthetic construct
  source 1..23: mol_type = other RNA
tctcttactgatttaccctaccc

SEQ ID NO: 1860 - RNA, 23 nt, synthetic construct
  source 1..23: mol_type = other RNA
tcctcttactgatttaccctacc

SEQ ID NO: 1861 - RNA, 23 nt, synthetic construct
  source 1..23: mol_type = other RNA
tacctcttactgatttaccctac

SEQ ID NO: 1862 - RNA, 23 nt, synthetic construct
  source 1..23: mol_type = other RNA
tacacctcttactgatttaccct

SEQ ID NO: 1863 - RNA, 23 nt, synthetic construct
  source 1..23: mol_type = other RNA
taacacctcttactgatttaccc

SEQ ID NO: 1864 - RNA, 23 nt, synthetic construct
  source 1..23: mol_type = other RNA
tggataaaaggcaactggtaaac

SEQ ID NO: 1865 - RNA, 23 nt, synthetic construct
  source 1..23: mol_type = other RNA
tgggataaaaggcaactggtaaa

SEQ ID NO: 1866 - RNA, 23 nt, synthetic construct
  source 1..23: mol_type = other RNA
tgttacaacaactttgggataaa

SEQ ID NO: 1867 - RNA, 23 nt, synthetic construct
  source 1..23: mol_type = other RNA
tcaggttacaacaactttgggat

SEQ ID NO: 1868 - RNA, 23 nt, synthetic construct
  source 1..23: mol_type = other RNA
tttcgaatcaatccaacagtagc

SEQ ID NO: 1869 - RNA, 21 nt, synthetic construct
  source 1..21: mol_type = other RNA
  modified_base 1: mod_base = OTHER; note = 2'-O-methyladenosine-3'-phosphorothioate
  modified_base 2: mod_base = OTHER; note = 2'-O-methylcytidine-3'-phosphorothioate
  modified_base 3: mod_base = OTHER; note = 2'-O-methyluridine-3'-phosphate
  modified_base 4: mod_base = OTHER; note = 2'-O-methylcytidine-3'-phosphate
  modified_base 5: mod_base = OTHER; note = 2'-O-methyluridine-3'-phosphate
  modified_base 6: mod_base = OTHER; note = 2'-O-methylguanosine-3'-phosphate
  modified_base 7: mod_base = OTHER; note = 2'-deoxy-2'-fluoroguanosine-3'-phosphate
  modified_base 8: mod_base = OTHER; note = 2'-O-methyladenosine-3'-phosphate
  modified_base 9: mod_base = OTHER; note = 2'-deoxy-2'-fluoroadenosine-3'-phosphate
  modified_base 10: mod_base = OTHER; note = 2'-deoxy-2'-fluorouridine-3'-phosphate
  modified_base 11: mod_base = OTHER; note = 2'-deoxy-2'-fluorocytidine-3'-phosphate
  modified_base 12: mod_base = OTHER; note = 2'-O-methylcytidine-3'-phosphate
  modified_base 13: mod_base = OTHER; note = 2'-O-methyladenosine-3'-phosphate
  modified_base 14: mod_base = OTHER; note = 2'-O-methyluridine-3'-phosphate
  modified_base 15: mod_base = OTHER; note = 2'-O-methyluridine-3'-phosphate
  modified_base 16: mod_base = OTHER; note = 2'-O-methylcytidine-3'-phosphate
  modified_base 17: mod_base = OTHER; note = 2'-O-methyluridine-3'-phosphate
  modified_base 18: mod_base = OTHER; note = 2'-O-methylguanosine-3'-phosphate
  modified_base 19: mod_base = OTHER; note = 2'-O-methylguanosine-3'-phosphate
  modified_base 20: mod_base = OTHER; note = 2'-O-methyluridine-3'-phosphate
  modified_base 21: mod_base = OTHER; note = 2'-O-methyladenosine-3'-phosphate ((2S,4R)-1-[29-[[2-(acetylamino)-2-deoxy-beta-D-galactopyra nosyl]oxy]-14,14-bis[[3-[[3-[[5-[[2-(acetylamino)-2-deoxy-b eta-D-galactopyranosyl]oxy]-1-oxopentyl]amino]propyl]amino] -3-oxopropoxy]methyl]-1,12,19,25-tetraoxo-16-oxa-13,20,24-t riazanonacos-1-yl]-4-hydroxy-2-pyrrolidinyl)methyl ester
actctggaatccattctggta

SEQ ID NO: 1870 - RNA, 21 nt, synthetic construct
  source 1..21: mol_type = other RNA
  modified_base 1: mod_base = OTHER; note = 2'-O-methylcytidine-3'-phosphorothioate
  modified_base 2: mod_base = OTHER; note = 2'-O-methyluridine-3'-phosphorothioate
  modified_base 3: mod_base = OTHER; note = 2'-O-methylcytidine-3'-phosphate
  modified_base 4: mod_base = OTHER; note = 2'-O-methyluridine-3'-phosphate
  modified_base 5: mod_base = OTHER; note = 2'-O-methylguanosine-3'-phosphate
  modified_base 6: mod_base = OTHER; note = 2'-O-methylguanosine-3'-phosphate
  modified_base 7: mod_base = OTHER; note = 2'-deoxy-2'-fluoroadenosine-3'-phosphate
  modified_base 8: mod_base = OTHER; note = 2'-O-methyladenosine-3'-phosphate
  modified_base 9: mod_base = OTHER; note = 2'-deoxy-2'-fluorouridine-3'-phosphate
  modified_base 10: mod_base = OTHER; note = 2'-deoxy-2'-fluorocytidine-3'-phosphate
  modified_base 11: mod_base = OTHER; note = 2'-deoxy-2'-fluorocytidine-3'-phosphate
  modified_base 12: mod_base = OTHER; note = 2'-O-methyladenosine-3'-phosphate
  modified_base 13: mod_base = OTHER; note = 2'-O-methyluridine-3'-phosphate
  modified_base 14: mod_base = OTHER; note = 2'-O-methyluridine-3'-phosphate
  modified_base 15: mod_base = OTHER; note = 2'-O-methylcytidine-3'-phosphate
  modified_base 16: mod_base = OTHER; note = 2'-O-methyluridine-3'-phosphate
  modified_base 17: mod_base = OTHER; note = 2'-O-methylguanosine-3'-phosphate
  modified_base 18: mod_base = OTHER; note = 2'-O-methylguanosine-3'-phosphate
  modified_base 19: mod_base = OTHER; note = 2'-O-methyluridine-3'-phosphate
  modified_base 20: mod_base = OTHER; note = 2'-O-methylguanosine-3'-phosphate
  modified_base 21: mod_base = OTHER; note = 2'-O-methyladenosine-3'-phosphate ((2S,4R)-1-[29-[[2-(acetylamino)-2-deoxy-beta-D-galactopyra nosyl]oxy]-14,14-bis[[3-[[3-[[5-[[2-(acetylamino)-2-deoxy-b eta-D-galactopyranosyl]oxy]-1-oxopentyl]amino]propyl]amino] -3-oxopropoxy]methyl]-1,12,19,25-tetraoxo-16-oxa-13,20,24-t riazanonacos-1-yl]-4-hydroxy-2-pyrrolidinyl)methyl ester
ctctggaatccattctggtga

SEQ ID NO: 1871 - RNA, 21 nt, synthetic construct
  source 1..21: mol_type = other RNA
  modified_base 1: mod_base = OTHER; note = 2'-O-methyluridine-3'-phosphorothioate
  modified_base 2: mod_base = OTHER; note = 2'-O-methylguanosine-3'-phosphorothioate
  modified_base 3: mod_base = OTHER; note = 2'-O-methylcytidine-3'-phosphate
  modified_base 4: mod_base = OTHER; note = 2'-O-methyluridine-3'-phosphate
  modified_base 5: mod_base = OTHER; note = 2'-O-methylcytidine-3'-phosphate
  modified_base 6: mod_base = OTHER; note = 2'-O-methyladenosine-3'-phosphate
  modified_base 7: mod_base = OTHER; note = 2'-deoxy-2'-fluorouridine-3'-phosphate
  modified_base 8: mod_base = OTHER; note = 2'-O-methylcytidine-3'-phosphate
  modified_base 9: mod_base = OTHER; note = 2'-deoxy-2'-fluorocytidine-3'-phosphate
  modified_base 10: mod_base = OTHER; note = 2'-deoxy-2'-fluorocytidine-3'-phosphate
  modified_base 11: mod_base = OTHER; note = 2'-deoxy-2'-fluoroadenosine-3'-phosphate
  modified_base 12: mod_base = OTHER; note = 2'-O-methylcytidine-3'-phosphate
  modified_base 13: mod_base = OTHER; note = 2'-O-methyluridine-3'-phosphate
  modified_base 14: mod_base = OTHER; note = 2'-O-methyladenosine-3'-phosphate
  modified_base 15: mod_base = OTHER; note = 2'-O-methyladenosine-3'-phosphate
  modified_base 16: mod_base = OTHER; note = 2'-O-methyluridine-3'-phosphate
  modified_base 17: mod_base = OTHER; note = 2'-O-methylguanosine-3'-phosphate
  modified_base 18: mod_base = OTHER; note = 2'-O-methyluridine-3'-phosphate
  modified_base 19: mod_base = OTHER; note = 2'-O-methylcytidine-3'-phosphate
  modified_base 20: mod_base = OTHER; note = 2'-O-methylcytidine-3'-phosphate
  modified_base 21: mod_base = OTHER; note = 2'-O-methyladenosine-3'-phosphate ((2S,4R)-1-[29-[[2-(acetylamino)-2-deoxy-beta-D-galactopyra nosyl]oxy]-14,14-bis[[3-[[3-[[5-[[2-(acetylamino)-2-deoxy-b eta-D-galactopyranosyl]oxy]-1-oxopentyl]amino]propyl]amino] -3-oxopropoxy]methyl]-1,12,19,25-tetraoxo-16-oxa-13,20,24-t riazanonacos-1-yl]-4-hydroxy-2-pyrrolidinyl)methyl ester
tgctcatcccactaatgtcca

SEQ ID NO: 1872 - RNA, 21 nt, synthetic construct
  source 1..21: mol_type = other RNA
  modified_base 1: mod_base = OTHER; note = 2'-O-methylcytidine-3'-phosphorothioate
  modified_base 2: mod_base = OTHER; note = 2'-O-methyluridine-3'-phosphorothioate
  modified_base 3: mod_base = OTHER; note = 2'-O-methylcytidine-3'-phosphate
  modified_base 4: mod_base = OTHER; note = 2'-O-methyladenosine-3'-phosphate
  modified_base 5: mod_base = OTHER; note = 2'-O-methyluridine-3'-phosphate
  modified_base 6: mod_base = OTHER; note = 2'-O-methylcytidine-3'-phosphate
  modified_base 7: mod_base = OTHER; note = 2'-deoxy-2'-fluorocytidine-3'-phosphate
  modified_base 8: mod_base = OTHER; note = 2'-O-methylcytidine-3'-phosphate
  modified_base 9: mod_base = OTHER; note = 2'-deoxy-2'-fluoroadenosine-3'-phosphate
  modified_base 10: mod_base = OTHER; note = 2'-deoxy-2'-fluorocytidine-3'-phosphate
  modified_base 11: mod_base = OTHER; note = 2'-deoxy-2'-fluorouridine-3'-phosphate
  modified_base 12: mod_base = OTHER; note = 2'-O-methyladenosine-3'-phosphate
  modified_base 13: mod_base = OTHER; note = 2'-O-methyladenosine-3'-phosphate
  modified_base 14: mod_base = OTHER; note = 2'-O-methyluridine-3'-phosphate
  modified_base 15: mod_base = OTHER; note = 2'-O-methylguanosine-3'-phosphate
  modified_base 16: mod_base = OTHER; note = 2'-O-methyluridine-3'-phosphate
  modified_base 17: mod_base = OTHER; note = 2'-O-methylcytidine-3'-phosphate
  modified_base 18: mod_base = OTHER; note = 2'-O-methylcytidine-3'-phosphate
  modified_base 19: mod_base = OTHER; note = 2'-O-methyladenosine-3'-phosphate
  modified_base 20: mod_base = OTHER; note = 2'-O-methylguanosine-3'-phosphate
  modified_base 21: mod_base = OTHER; note = 2'-O-methyladenosine-3'-phosphate ((2S,4R)-1-[29-[[2-(acetylamino)-2-deoxy-beta-D-galactopyra nosyl]oxy]-14,14-bis[[3-[[3-[[5-[[2-(acetylamino)-2-deoxy-b eta-D-galactopyranosyl]oxy]-1-oxopentyl]amino]propyl]amino] -3-oxopropoxy]methyl]-1,12,19,25-tetraoxo-16-oxa-13,20,24-t riazanonacos-1-yl]-4-hydroxy-2-pyrrolidinyl)methyl ester
ctcatcccactaatgtccaga

SEQ ID NO: 1873 - RNA, 21 nt, synthetic construct
  source 1..21: mol_type = other RNA
  modified_base 1: mod_base = OTHER; note = 2'-O-methylcytidine-3'-phosphorothioate
  modified_base 2: mod_base = OTHER; note = 2'-O-methylcytidine-3'-phosphorothioate
  modified_base 3: mod_base = OTHER; note = 2'-O-methyladenosine-3'-phosphate
  modified_base 4: mod_base = OTHER; note = 2'-O-methyluridine-3'-phosphate
  modified_base 5: mod_base = OTHER; note = 2'-O-methylguanosine-3'-phosphate
  modified_base 6: mod_base = OTHER; note = 2'-O-methylcytidine-3'-phosphate
  modified_base 7: mod_base = OTHER; note = 2'-deoxy-2'-fluoroadenosine-3'-phosphate
  modified_base 8: mod_base = OTHER; note = 2'-O-methylguanosine-3'-phosphate
  modified_base 9: mod_base = OTHER; note = 2'-deoxy-2'-fluoroadenosine-3'-phosphate
  modified_base 10: mod_base = OTHER; note = 2'-deoxy-2'-fluoroadenosine-3'-phosphate
  modified_base 11: mod_base = OTHER; note = 2'-deoxy-2'-fluorouridine-3'-phosphate
  modified_base 12: mod_base = OTHER; note = 2'-O-methyladenosine-3'-phosphate
  modified_base 13: mod_base = OTHER; note = 2'-O-methylcytidine-3'-phosphate
  modified_base 14: mod_base = OTHER; note = 2'-O-methyladenosine-3'-phosphate
  modified_base 15: mod_base = OTHER; note = 2'-O-methyladenosine-3'-phosphate
  modified_base 16: mod_base = OTHER; note = 2'-O-methyladenosine-3'-phosphate
  modified_base 17: mod_base = OTHER; note = 2'-O-methyluridine-3'-phosphate
  modified_base 18: mod_base = OTHER; note = 2'-O-methylguanosine-3'-phosphate
  modified_base 19: mod_base = OTHER; note = 2'-O-methyladenosine-3'-phosphate
  modified_base 20: mod_base = OTHER; note = 2'-O-methyluridine-3'-phosphate
  modified_base 21: mod_base = OTHER; note = 2'-O-methyladenosine-3'-phosphate ((2S,4R)-1-[29-[[2-(acetylamino)-2-deoxy-beta-D-galactopyra nosyl]oxy]-14,14-bis[[3-[[3-[[5-[[2-(acetylamino)-2-deoxy-b eta-D-galactopyranosyl]oxy]-1-oxopentyl]amino]propyl]amino] -3-oxopropoxy]methyl]-1,12,19,25-tetraoxo-16-oxa-13,20,24-t riazanonacos-1-yl]-4-hydroxy-2-pyrrolidinyl)methyl ester
ccatgcagaatacaaatgata

SEQ ID NO: 1874 - RNA, 21 nt, synthetic construct
  source 1..21: mol_type = other RNA
  modified_base 1: mod_base = OTHER; note = 2'-O-methylcytidine-3'-phosphorothioate
  modified_base 2: mod_base = OTHER; note = 2'-O-methyladenosine-3'-phosphorothioate
  modified_base 3: mod_base = OTHER; note = 2'-O-methyluridine-3'-phosphate
  modified_base 4: mod_base = OTHER; note = 2'-O-methylguanosine-3'-phosphate
  modified_base 5: mod_base = OTHER; note = 2'-O-methylcytidine-3'-phosphate
  modified_base 6: mod_base = OTHER; note = 2'-O-methyladenosine-3'-phosphate
  modified_base 7: mod_base = OTHER; note = 2'-deoxy-2'-fluoroguanosine-3'-phosphate
  modified_base 8: mod_base = OTHER; note = 2'-O-methyladenosine-3'-phosphate
  modified_base 9: mod_base = OTHER; note = 2'-deoxy-2'-fluoroadenosine-3'-phosphate
  modified_base 10: mod_base = OTHER; note = 2'-deoxy-2'-fluorouridine-3'-phosphate
  modified_base 11: mod_base = OTHER; note = 2'-deoxy-2'-fluoroadenosine-3'-phosphate
  modified_base 12: mod_base = OTHER; note = 2'-O-methylcytidine-3'-phosphate
  modified_base 13: mod_base = OTHER; note = 2'-O-methyladenosine-3'-phosphate
  modified_base 14: mod_base = OTHER; note = 2'-O-methyladenosine-3'-phosphate
  modified_base 15: mod_base = OTHER; note = 2'-O-methyladenosine-3'-phosphate
  modified_base 16: mod_base = OTHER; note = 2'-O-methyluridine-3'-phosphate
  modified_base 17: mod_base = OTHER; note = 2'-O-methylguanosine-3'-phosphate
  modified_base 18: mod_base = OTHER; note = 2'-O-methyladenosine-3'-phosphate
  modified_base 19: mod_base = OTHER; note = 2'-O-methyluridine-3'-phosphate
  modified_base 20: mod_base = OTHER; note = 2'-O-methylguanosine-3'-phosphate
  modified_base 21: mod_base = OTHER; note = 2'-O-methyladenosine-3'-phosphate ((2S,4R)-1-[29-[[2-(acetylamino)-2-deoxy-beta-D-galactopyra nosyl]oxy]-14,14-bis[[3-[[3-[[5-[[2-(acetylamino)-2-deoxy-b eta-D-galactopyranosyl]oxy]-1-oxopentyl]amino]propyl]amino] -3-oxopropoxy]methyl]-1,12,19,25-tetraoxo-16-oxa-13,20,24-t riazanonacos-1-yl]-4-hydroxy-2-pyrrolidinyl)methyl ester
catgcagaatacaaatgatga

SEQ ID NO: 1875 - RNA, 21 nt, synthetic construct
  source 1..21: mol_type = other RNA
  modified_base 1: mod_base = OTHER; note = 2'-O-methyladenosine-3'-phosphorothioate
  modified_base 2: mod_base = OTHER; note = 2'-O-methylguanosine-3'-phosphorothioate
  modified_base 3: mod_base = OTHER; note = 2'-O-methyladenosine-3'-phosphate
  modified_base 4: mod_base = OTHER; note = 2'-O-methyladenosine-3'-phosphate
  modified_base 5: mod_base = OTHER; note = 2'-O-methylguanosine-3'-phosphate
  modified_base 6: mod_base = OTHER; note = 2'-O-methylguanosine-3'-phosphate
  modified_base 7: mod_base = OTHER; note = 2'-deoxy-2'-fluoroadenosine-3'-phosphate
  modified_base 8: mod_base = OTHER; note = 2'-O-methylguanosine-3'-phosphate
  modified_base 9: mod_base = OTHER; note = 2'-deoxy-2'-fluorocytidine-3'-phosphate
  modified_base 10: mod_base = OTHER; note = 2'-deoxy-2'-fluorouridine-3'-phosphate
  modified_base 11: mod_base = OTHER; note = 2'-deoxy-2'-fluoroadenosine-3'-phosphate
  modified_base 12: mod_base = OTHER; note = 2'-O-methyladenosine-3'-phosphate
  modified_base 13: mod_base = OTHER; note = 2'-O-methyladenosine-3'-phosphate
  modified_base 14: mod_base = OTHER; note = 2'-O-methyladenosine-3'-phosphate
  modified_base 15: mod_base = OTHER; note = 2'-O-methyluridine-3'-phosphate
  modified_base 16: mod_base = OTHER; note = 2'-O-methylguanosine-3'-phosphate
  modified_base 17: mod_base = OTHER; note = 2'-O-methylguanosine-3'-phosphate
  modified_base 18: mod_base = OTHER; note = 2'-O-methylcytidine-3'-phosphate
  modified_base 19: mod_base = OTHER; note = 2'-O-methyladenosine-3'-phosphate
  modified_base 20: mod_base = OTHER; note = 2'-O-methylguanosine-3'-phosphate
  modified_base 21: mod_base = OTHER; note = 2'-O-methyladenosine-3'-phosphate ((2S,4R)-1-[29-[[2-(acetylamino)-2-deoxy-beta-D-galactopyra nosyl]oxy]-14,14-bis[[3-[[3-[[5-[[2-(acetylamino)-2-deoxy-b eta-D-galactopyranosyl]oxy]-1-oxopentyl]amino]propyl]amino] -3-oxopropoxy]methyl]-1,12,19,25-tetraoxo-16-oxa-13,20,24-t riazanonacos-1-yl]-4-hydroxy-2-pyrrolidinyl)methyl ester
agaaggagctaaaatggcaga

SEQ ID NO: 1876 - RNA, 21 nt, synthetic construct
  source 1..21: mol_type = other RNA
  modified_base 1: mod_base = OTHER; note = 2'-O-methylguanosine-3'-phosphorothioate
  modified_base 2: mod_base = OTHER; note = 2'-O-methylguanosine-3'-phosphorothioate
  modified_base 3: mod_base = OTHER; note = 2'-O-methyladenosine-3'-phosphate
  modified_base 4: mod_base = OTHER; note = 2'-O-methylguanosine-3'-phosphate
  modified_base 5: mod_base = OTHER; note = 2'-O-methylcytidine-3'-phosphate
  modified_base 6: mod_base = OTHER; note = 2'-O-methyluridine-3'-phosphate
  modified_base 7: mod_base = OTHER; note = 2'-deoxy-2'-fluoroadenosine-3'-phosphate
  modified_base 8: mod_base = OTHER; note = 2'-O-methyladenosine-3'-phosphate
  modified_base 9: mod_base = OTHER; note = 2'-deoxy-2'-fluoroadenosine-3'-phosphate
  modified_base 10: mod_base = OTHER; note = 2'-deoxy-2'-fluoroadenosine-3'-phosphate
  modified_base 11: mod_base = OTHER; note = 2'-deoxy-2'-fluorouridine-3'-phosphate
  modified_base 12: mod_base = OTHER; note = 2'-O-methylguanosine-3'-phosphate
  modified_base 13: mod_base = OTHER; note = 2'-O-methylguanosine-3'-phosphate
  modified_base 14: mod_base = OTHER; note = 2'-O-methylcytidine-3'-phosphate
  modified_base 15: mod_base = OTHER; note = 2'-O-methyladenosine-3'-phosphate
  modified_base 16: mod_base = OTHER; note = 2'-O-methylguanosine-3'-phosphate
  modified_base 17: mod_base = OTHER; note = 2'-O-methyluridine-3'-phosphate
  modified_base 18: mod_base = OTHER; note = 2'-O-methylguanosine-3'-phosphate
  modified_base 19: mod_base = OTHER; note = 2'-O-methylcytidine-3'-phosphate
  modified_base 20: mod_base = OTHER; note = 2'-O-methylguanosine-3'-phosphate
  modified_base 21: mod_base = OTHER; note = 2'-O-methyladenosine-3'-phosphate ((2S,4R)-1-[29-[[2-(acetylamino)-2-deoxy-beta-D-galactopyra nosyl]oxy]-14,14-bis[[3-[[3-[[5-[[2-(acetylamino)-2-deoxy-b eta-D-galactopyranosyl]oxy]-1-oxopentyl]amino]propyl]amino] -3-oxopropoxy]methyl]-1,12,19,25-tetraoxo-16-oxa-13,20,24-t riazanonacos-1-yl]-4-hydroxy-2-pyrrolidinyl)methyl ester
ggagctaaaatggcagtgcga

SEQ ID NO: 1877 - RNA, 21 nt, synthetic construct
  source 1..21: mol_type = other RNA
  modified_base 1: mod_base = OTHER; note = 2'-O-methyluridine-3'-phosphorothioate
  modified_base 2: mod_base = OTHER; note = 2'-O-methyladenosine-3'-phosphorothioate
  modified_base 3: mod_base = OTHER; note = 2'-O-methylcytidine-3'-phosphate
  modified_base 4: mod_base = OTHER; note = 2'-O-methyluridine-3'-phosphate
  modified_base 5: mod_base = OTHER; note = 2'-O-methylguanosine-3'-phosphate
  modified_base 6: mod_base = OTHER; note = 2'-O-methylguanosine-3'-phosphate
  modified_base 7: mod_base = OTHER; note = 2'-deoxy-2'-fluorocytidine-3'-phosphate
  modified_base 8: mod_base = OTHER; note = 2'-O-methylcytidine-3'-phosphate
  modified_base 9: mod_base = OTHER; note = 2'-deoxy-2'-fluoroadenosine-3'-phosphate
  modified_base 10: mod_base = OTHER; note = 2'-deoxy-2'-fluorouridine-3'-phosphate
  modified_base 11: mod_base = OTHER; note = 2'-deoxy-2'-fluorocytidine-3'-phosphate
  modified_base 12: mod_base = OTHER; note = 2'-O-methyluridine-3'-phosphate
  modified_base 13: mod_base = OTHER; note = 2'-O-methyluridine-3'-phosphate
  modified_base 14: mod_base = OTHER; note = 2'-O-methyluridine-3'-phosphate
  modified_base 15: mod_base = OTHER; note = 2'-O-methyladenosine-3'-phosphate
  modified_base 16: mod_base = OTHER; note = 2'-O-methyladenosine-3'-phosphate
  modified_base 17: mod_base = OTHER; note = 2'-O-methylguanosine-3'-phosphate
  modified_base 18: mod_base = OTHER; note = 2'-O-methyluridine-3'-phosphate
  modified_base 19: mod_base = OTHER; note = 2'-O-methylcytidine-3'-phosphate
  modified_base 20: mod_base = OTHER; note = 2'-O-methyluridine-3'-phosphate
  modified_base 21: mod_base = OTHER; note = 2'-O-methyladenosine-3'-phosphate ((2S,4R)-1-[29-[[2-(acetylamino)-2-deoxy-beta-D-galactopyra nosyl]oxy]-14,14-bis[[3-[[3-[[5-[[2-(acetylamino)-2-deoxy-b eta-D-galactopyranosyl]oxy]-1-oxopentyl]amino]propyl]amino] -3-oxopropoxy]methyl]-1,12,19,25-tetraoxo-16-oxa-13,20,24-t riazanonacos-1-yl]-4-hydroxy-2-pyrrolidinyl)methyl ester
tactggccatctttaagtcta

SEQ ID NO: 1878 - RNA, 21 nt, synthetic construct
  source 1..21: mol_type = other RNA
  modified_base 1: mod_base = OTHER; note = 2'-O-methyladenosine-3'-phosphorothioate
  modified_base 2: mod_base = OTHER; note = 2'-O-methylcytidine-3'-phosphorothioate
  modified_base 3: mod_base = OTHER; note = 2'-O-methyluridine-3'-phosphate
  modified_base 4: mod_base = OTHER; note = 2'-O-methylguanosine-3'-phosphate
  modified_base 5: mod_base = OTHER; note = 2'-O-methylguanosine-3'-phosphate
  modified_base 6: mod_base = OTHER; note = 2'-O-methylcytidine-3'-phosphate
  modified_base 7: mod_base = OTHER; note = 2'-deoxy-2'-fluorocytidine-3'-phosphate
  modified_base 8: mod_base = OTHER; note = 2'-O-methyladenosine-3'-phosphate
  modified_base 9: mod_base = OTHER; note = 2'-deoxy-2'-fluorouridine-3'-phosphate
  modified_base 10: mod_base = OTHER; note = 2'-deoxy-2'-fluorocytidine-3'-phosphate
  modified_base 11: mod_base = OTHER; note = 2'-deoxy-2'-fluorouridine-3'-phosphate
  modified_base 12: mod_base = OTHER; note = 2'-O-methyluridine-3'-phosphate
  modified_base 13: mod_base = OTHER; note = 2'-O-methyluridine-3'-phosphate
  modified_base 14: mod_base = OTHER; note = 2'-O-methyladenosine-3'-phosphate
  modified_base 15: mod_base = OTHER; note = 2'-O-methyladenosine-3'-phosphate
  modified_base 16: mod_base = OTHER; note = 2'-O-methylguanosine-3'-phosphate
  modified_base 17: mod_base = OTHER; note = 2'-O-methyluridine-3'-phosphate
  modified_base 18: mod_base = OTHER; note = 2'-O-methylcytidine-3'-phosphate
  modified_base 19: mod_base = OTHER; note = 2'-O-methyluridine-3'-phosphate
  modified_base 20: mod_base = OTHER; note = 2'-O-methylguanosine-3'-phosphate
  modified_base 21: mod_base = OTHER; note = 2'-O-methyladenosine-3'-phosphate ((2S,4R)-1-[29-[[2-(acetylamino)-2-deoxy-beta-D-galactopyra nosyl]oxy]-14,14-bis[[3-[[3-[[5-[[2-(acetylamino)-2-deoxy-b eta-D-galactopyranosyl]oxy]-1-oxopentyl]amino]propyl]amino] -3-oxopropoxy]methyl]-1,12,19,25-tetraoxo-16-oxa-13,20,24-t riazanonacos-1-yl]-4-hydroxy-2-pyrrolidinyl)methyl ester
actggccatctttaagtctga

SEQ ID NO: 1879 - RNA, 21 nt, synthetic construct
  source 1..21: mol_type = other RNA
  modified_base 1: mod_base = OTHER; note = 2'-O-methylcytidine-3'-phosphorothioate
  modified_base 2: mod_base = OTHER; note = 2'-O-methyluridine-3'-phosphorothioate
  modified_base 3: mod_base = OTHER; note = 2'-O-methylguanosine-3'-phosphate
  modified_base 4: mod_base = OTHER; note = 2'-O-methylguanosine-3'-phosphate
  modified_base 5: mod_base = OTHER; note = 2'-O-methylcytidine-3'-phosphate
  modified_base 6: mod_base = OTHER; note = 2'-O-methylcytidine-3'-phosphate
  modified_base 7: mod_base = OTHER; note = 2'-deoxy-2'-fluoroadenosine-3'-phosphate
  modified_base 8: mod_base = OTHER; note = 2'-O-methyluridine-3'-phosphate
  modified_base 9: mod_base = OTHER; note = 2'-deoxy-2'-fluorocytidine-3'-phosphate
  modified_base 10: mod_base = OTHER; note = 2'-deoxy-2'-fluorouridine-3'-phosphate
  modified_base 11: mod_base = OTHER; note = 2'-deoxy-2'-fluorouridine-3'-phosphate
  modified_base 12: mod_base = OTHER; note = 2'-O-methyluridine-3'-phosphate
  modified_base 13: mod_base = OTHER; note = 2'-O-methyladenosine-3'-phosphate
  modified_base 14: mod_base = OTHER; note = 2'-O-methyladenosine-3'-phosphate
  modified_base 15: mod_base = OTHER; note = 2'-O-methylguanosine-3'-phosphate
  modified_base 16: mod_base = OTHER; note = 2'-O-methyluridine-3'-phosphate
  modified_base 17: mod_base = OTHER; note = 2'-O-methylcytidine-3'-phosphate
  modified_base 18: mod_base = OTHER; note = 2'-O-methyluridine-3'-phosphate
  modified_base 19: mod_base = OTHER; note = 2'-O-methylguanosine-3'-phosphate
  modified_base 20: mod_base = OTHER; note = 2'-O-methylguanosine-3'-phosphate
  modified_base 21: mod_base = OTHER; note = 2'-O-methyladenosine-3'-phosphate ((2S,4R)-1-[29-[[2-(acetylamino)-2-deoxy-beta-D-galactopyra nosyl]oxy]-14,14-bis[[3-[[3-[[5-[[2-(acetylamino)-2-deoxy-b eta-D-galactopyranosyl]oxy]-1-oxopentyl]amino]propyl]amino] -3-oxopropoxy]methyl]-1,12,19,25-tetraoxo-16-oxa-13,20,24-t riazanonacos-1-yl]-4-hydroxy-2-pyrrolidinyl)methyl ester
ctggccatctttaagtctgga

SEQ ID NO: 1880 - RNA, 21 nt, synthetic construct
  source 1..21: mol_type = other RNA
  modified_base 1: mod_base = OTHER; note = 2'-O-methyluridine-3'-phosphorothioate
  modified_base 2: mod_base = OTHER; note = 2'-O-methyladenosine-3'-phosphorothioate
  modified_base 3: mod_base = OTHER; note = 2'-O-methyladenosine-3'-phosphate
  modified_base 4: mod_base = OTHER; note = 2'-O-methylcytidine-3'-phosphate
  modified_base 5: mod_base = OTHER; note = 2'-O-methylcytidine-3'-phosphate
  modified_base 6: mod_base = OTHER; note = 2'-O-methyluridine-3'-phosphate
  modified_base 7: mod_base = OTHER; note = 2'-deoxy-2'-fluorocytidine-3'-phosphate
  modified_base 8: mod_base = OTHER; note = 2'-O-methyladenosine-3'-phosphate
  modified_base 9: mod_base = OTHER; note = 2'-deoxy-2'-fluorocytidine-3'-phosphate
  modified_base 10: mod_base = OTHER; note = 2'-deoxy-2'-fluorouridine-3'-phosphate
  modified_base 11: mod_base = OTHER; note = 2'-deoxy-2'-fluorouridine-3'-phosphate
  modified_base 12: mod_base = OTHER; note = 2'-O-methylguanosine-3'-phosphate
  modified_base 13: mod_base = OTHER; note = 2'-O-methylcytidine-3'-phosphate
  modified_base 14: mod_base = OTHER; note = 2'-O-methyladenosine-3'-phosphate
  modified_base 15: mod_base = OTHER; note = 2'-O-methyladenosine-3'-phosphate
  modified_base 16: mod_base = OTHER; note = 2'-O-methyluridine-3'-phosphate
  modified_base 17: mod_base = OTHER; note = 2'-O-methyladenosine-3'-phosphate
  modified_base 18: mod_base = OTHER; note = 2'-O-methyladenosine-3'-phosphate
  modified_base 19: mod_base = OTHER; note = 2'-O-methyluridine-3'-phosphate
  modified_base 20: mod_base = OTHER; note = 2'-O-methyluridine-3'-phosphate
  modified_base 21: mod_base = OTHER; note = 2'-O-methyladenosine-3'-phosphate ((2S,4R)-1-[29-[[2-(acetylamino)-2-deoxy-beta-D-galactopyra nosyl]oxy]-14,14-bis[[3-[[3-[[5-[[2-(acetylamino)-2-deoxy-b eta-D-galactopyranosyl]oxy]-1-oxopentyl]amino]propyl]amino] -3-oxopropoxy]methyl]-1,12,19,25-tetraoxo-16-oxa-13,20,24-t riazanonacos-1-yl]-4-hydroxy-2-pyrrolidinyl)methyl ester
taacctcacttgcaataatta

SEQ ID NO: 1881 - RNA, 21 nt, synthetic construct
  source 1..21: mol_type = other RNA
  modified_base 1: mod_base = OTHER; note = 2'-O-methyladenosine-3'-phosphorothioate
  modified_base 2: mod_base = OTHER; note = 2'-O-methyladenosine-3'-phosphorothioate
  modified_base 3: mod_base = OTHER; note = 2'-O-methylcytidine-3'-phosphate
  modified_base 4: mod_base = OTHER; note = 2'-O-methylcytidine-3'-phosphate
  modified_base 5: mod_base = OTHER; note = 2'-O-methyluridine-3'-phosphate
  modified_base 6: mod_base = OTHER; note = 2'-O-methylcytidine-3'-phosphate
  modified_base 7: mod_base = OTHER; note = 2'-deoxy-2'-fluoroadenosine-3'-phosphate
  modified_base 8: mod_base = OTHER; note = 2'-O-methylcytidine-3'-phosphate
  modified_base 9: mod_base = OTHER; note = 2'-deoxy-2'-fluorouridine-3'-phosphate
  modified_base 10: mod_base = OTHER; note = 2'-deoxy-2'-fluorouridine-3'-phosphate
  modified_base 11: mod_base = OTHER; note = 2'-deoxy-2'-fluoroguanosine-3'-phosphate
  modified_base 12: mod_base = OTHER; note = 2'-O-methylcytidine-3'-phosphate
  modified_base 13: mod_base = OTHER; note = 2'-O-methyladenosine-3'-phosphate
  modified_base 14: mod_base = OTHER; note = 2'-O-methyladenosine-3'-phosphate
  modified_base 15: mod_base = OTHER; note = 2'-O-methyluridine-3'-phosphate
  modified_base 16: mod_base = OTHER; note = 2'-O-methyladenosine-3'-phosphate
  modified_base 17: mod_base = OTHER; note = 2'-O-methyladenosine-3'-phosphate
  modified_base 18: mod_base = OTHER; note = 2'-O-methyluridine-3'-phosphate
  modified_base 19: mod_base = OTHER; note = 2'-O-methyluridine-3'-phosphate
  modified_base 20: mod_base = OTHER; note = 2'-O-methyladenosine-3'-phosphate
  modified_base 21: mod_base = OTHER; note = 2'-O-methyladenosine-3'-phosphate ((2S,4R)-1-[29-[[2-(acetylamino)-2-deoxy-beta-D-galactopyra nosyl]oxy]-14,14-bis[[3-[[3-[[5-[[2-(acetylamino)-2-deoxy-b eta-D-galactopyranosyl]oxy]-1-oxopentyl]amino]propyl]amino] -3-oxopropoxy]methyl]-1,12,19,25-tetraoxo-16-oxa-13,20,24-t riazanonacos-1-yl]-4-hydroxy-2-pyrrolidinyl)methyl ester
aacctcacttgcaataattaa

SEQ ID NO: 1882 - RNA, 21 nt, synthetic construct
  source 1..21: mol_type = other RNA
  modified_base 1: mod_base = OTHER; note = 2'-O-methylguanosine-3'-phosphorothioate
  modified_base 2: mod_base = OTHER; note = 2'-O-methylcytidine-3'-phosphorothioate
  modified_base 3: mod_base = OTHER; note = 2'-O-methylcytidine-3'-phosphate
  modified_base 4: mod_base = OTHER; note = 2'-O-methyladenosine-3'-phosphate
  modified_base 5: mod_base = OTHER; note = 2'-O-methyluridine-3'-phosphate
  modified_base 6: mod_base = OTHER; note = 2'-O-methylcytidine-3'-phosphate
  modified_base 7: mod_base = OTHER; note = 2'-deoxy-2'-fluorouridine-3'-phosphate
  modified_base 8: mod_base = OTHER; note = 2'-O-methylguanosine-3'-phosphate
  modified_base 9: mod_base = OTHER; note = 2'-deoxy-2'-fluorouridine-3'-phosphate
  modified_base 10: mod_base = OTHER; note = 2'-deoxy-2'-fluoroguanosine-3'-phosphate
  modified_base 11: mod_base = OTHER; note = 2'-deoxy-2'-fluorocytidine-3'-phosphate
  modified_base 12: mod_base = OTHER; note = 2'-O-methyluridine-3'-phosphate
  modified_base 13: mod_base = OTHER; note = 2'-O-methylcytidine-3'-phosphate
  modified_base 14: mod_base = OTHER; note = 2'-O-methyluridine-3'-phosphate
  modified_base 15: mod_base = OTHER; note = 2'-O-methyluridine-3'-phosphate
  modified_base 16: mod_base = OTHER; note = 2'-O-methylcytidine-3'-phosphate
  modified_base 17: mod_base = OTHER; note = 2'-O-methylguanosine-3'-phosphate
  modified_base 18: mod_base = OTHER; note = 2'-O-methyluridine-3'-phosphate
  modified_base 19: mod_base = OTHER; note = 2'-O-methylcytidine-3'-phosphate
  modified_base 20: mod_base = OTHER; note = 2'-O-methyladenosine-3'-phosphate
  modified_base 21: mod_base = OTHER; note = 2'-O-methyladenosine-3'-phosphate ((2S,4R)-1-[29-[[2-(acetylamino)-2-deoxy-beta-D-galactopyra nosyl]oxy]-14,14-bis[[3-[[3-[[5-[[2-(acetylamino)-2-deoxy-b eta-D-galactopyranosyl]oxy]-1-oxopentyl]amino]propyl]amino] -3-oxopropoxy]methyl]-1,12,19,25-tetraoxo-16-oxa-13,20,24-t riazanonacos-1-yl]-4-hydroxy-2-pyrrolidinyl)methyl ester
gccatctgtgctcttcgtcaa

SEQ ID NO: 1883 - RNA, 21 nt, synthetic construct
  source 1..21: mol_type = other RNA
  modified_base 1: mod_base = OTHER; note = 2'-O-methylcytidine-3'-phosphorothioate
  modified_base 2: mod_base = OTHER; note = 2'-O-methylcytidine-3'-phosphorothioate
  modified_base 3: mod_base = OTHER; note = 2'-O-methyladenosine-3'-phosphate
  modified_base 4: mod_base = OTHER; note = 2'-O-methyluridine-3'-phosphate
  modified_base 5: mod_base = OTHER; note = 2'-O-methylcytidine-3'-phosphate
  modified_base 6: mod_base = OTHER; note = 2'-O-methyluridine-3'-phosphate
  modified_base 7: mod_base = OTHER; note = 2'-deoxy-2'-fluoroguanosine-3'-phosphate
  modified_base 8: mod_base = OTHER; note = 2'-O-methyluridine-3'-phosphate
  modified_base 9: mod_base = OTHER; note = 2'-deoxy-2'-fluoroguanosine-3'-phosphate
  modified_base 10: mod_base = OTHER; note = 2'-deoxy-2'-fluorocytidine-3'-phosphate
  modified_base 11: mod_base = OTHER; note = 2'-deoxy-2'-fluorouridine-3'-phosphate
  modified_base 12: mod_base = OTHER; note = 2'-O-methylcytidine-3'-phosphate
  modified_base 13: mod_base = OTHER; note = 2'-O-methyluridine-3'-phosphate
  modified_base 14: mod_base = OTHER; note = 2'-O-methyluridine-3'-phosphate
  modified_base 15: mod_base = OTHER; note = 2'-O-methylcytidine-3'-phosphate
  modified_base 16: mod_base = OTHER; note = 2'-O-methylguanosine-3'-phosphate
  modified_base 17: mod_base = OTHER; note = 2'-O-methyluridine-3'-phosphate
  modified_base 18: mod_base = OTHER; note = 2'-O-methylcytidine-3'-phosphate
  modified_base 19: mod_base = OTHER; note = 2'-O-methyladenosine-3'-phosphate
  modified_base 20: mod_base = OTHER; note = 2'-O-methyluridine-3'-phosphate
  modified_base 21: mod_base = OTHER; note = 2'-O-methyladenosine-3'-phosphate ((2S,4R)-1-[29-[[2-(acetylamino)-2-deoxy-beta-D-galactopyra nosyl]oxy]-14,14-bis[[3-[[3-[[5-[[2-(acetylamino)-2-deoxy-b eta-D-galactopyranosyl]oxy]-1-oxopentyl]amino]propyl]amino] -3-oxopropoxy]methyl]-1,12,19,25-tetraoxo-16-oxa-13,20,24-t riazanonacos-1-yl]-4-hydroxy-2-pyrrolidinyl)methyl ester
ccatctgtgctcttcgtcata

SEQ ID NO: 1884 - RNA, 21 nt, synthetic construct
  source 1..21: mol_type = other RNA
  modified_base 1: mod_base = OTHER; note = 2'-O-methyladenosine-3'-phosphorothioate
  modified_base 2: mod_base = OTHER; note = 2'-O-methyluridine-3'-phosphorothioate
  modified_base 3: mod_base = OTHER; note = 2'-O-methylcytidine-3'-phosphate
  modified_base 4: mod_base = OTHER; note = 2'-O-methyluridine-3'-phosphate
  modified_base 5: mod_base = OTHER; note = 2'-O-methylguanosine-3'-phosphate
  modified_base 6: mod_base = OTHER; note = 2'-O-methyluridine-3'-phosphate
  modified_base 7: mod_base = OTHER; note = 2'-deoxy-2'-fluoroguanosine-3'-phosphate
  modified_base 8: mod_base = OTHER; note = 2'-O-methylcytidine-3'-phosphate
  modified_base 9: mod_base = OTHER; note = 2'-deoxy-2'-fluorouridine-3'-phosphate
  modified_base 10: mod_base = OTHER; note = 2'-deoxy-2'-fluorocytidine-3'-phosphate
  modified_base 11: mod_base = OTHER; note = 2'-deoxy-2'-fluorouridine-3'-phosphate
  modified_base 12: mod_base = OTHER; note = 2'-O-methyluridine-3'-phosphate
  modified_base 13: mod_base = OTHER; note = 2'-O-methylcytidine-3'-phosphate
  modified_base 14: mod_base = OTHER; note = 2'-O-methylguanosine-3'-phosphate
  modified_base 15: mod_base = OTHER; note = 2'-O-methyluridine-3'-phosphate
  modified_base 16: mod_base = OTHER; note = 2'-O-methylcytidine-3'-phosphate
  modified_base 17: mod_base = OTHER; note = 2'-O-methyladenosine-3'-phosphate
  modified_base 18: mod_base = OTHER; note = 2'-O-methyluridine-3'-phosphate
  modified_base 19: mod_base = OTHER; note = 2'-O-methylcytidine-3'-phosphate
  modified_base 20: mod_base = OTHER; note = 2'-O-methyluridine-3'-phosphate
  modified_base 21: mod_base = OTHER; note = 2'-O-methyladenosine-3'-phosphate ((2S,4R)-1-[29-[[2-(acetylamino)-2-deoxy-beta-D-galactopyra nosyl]oxy]-14,14-bis[[3-[[3-[[5-[[2-(acetylamino)-2-deoxy-b eta-D-galactopyranosyl]oxy]-1-oxopentyl]amino]propyl]amino] -3-oxopropoxy]methyl]-1,12,19,25-tetraoxo-16-oxa-13,20,24-t riazanonacos-1-yl]-4-hydroxy-2-pyrrolidinyl)methyl ester
atctgtgctcttcgtcatcta

SEQ ID NO: 1885 - RNA, 21 nt, synthetic construct
  source 1..21: mol_type = other RNA
  modified_base 1: mod_base = OTHER; note = 2'-O-methyluridine-3'-phosphorothioate
  modified_base 2: mod_base = OTHER; note = 2'-O-methylcytidine-3'-phosphorothioate
  modified_base 3: mod_base = OTHER; note = 2'-O-methyluridine-3'-phosphate
  modified_base 4: mod_base = OTHER; note = 2'-O-methylguanosine-3'-phosphate
  modified_base 5: mod_base = OTHER; note = 2'-O-methyluridine-3'-phosphate
  modified_base 6: mod_base = OTHER; note = 2'-O-methylguanosine-3'-phosphate
  modified_base 7: mod_base = OTHER; note = 2'-deoxy-2'-fluorocytidine-3'-phosphate
  modified_base 8: mod_base = OTHER; note = 2'-O-methyluridine-3'-phosphate
  modified_base 9: mod_base = OTHER; note = 2'-deoxy-2'-fluorocytidine-3'-phosphate
  modified_base 10: mod_base = OTHER; note = 2'-deoxy-2'-fluorouridine-3'-phosphate
  modified_base 11: mod_base = OTHER; note = 2'-deoxy-2'-fluorouridine-3'-phosphate
  modified_base 12: mod_base = OTHER; note = 2'-O-methylcytidine-3'-phosphate
  modified_base 13: mod_base = OTHER; note = 2'-O-methylguanosine-3'-phosphate
  modified_base 14: mod_base = OTHER; note = 2'-O-methyluridine-3'-phosphate
  modified_base 15: mod_base = OTHER; note = 2'-O-methylcytidine-3'-phosphate
  modified_base 16: mod_base = OTHER; note = 2'-O-methyladenosine-3'-phosphate
  modified_base 17: mod_base = OTHER; note = 2'-O-methyluridine-3'-phosphate
  modified_base 18: mod_base = OTHER; note = 2'-O-methylcytidine-3'-phosphate
  modified_base 19: mod_base = OTHER; note = 2'-O-methyluridine-3'-phosphate
  modified_base 20: mod_base = OTHER; note = 2'-O-methylguanosine-3'-phosphate
  modified_base 21: mod_base = OTHER; note = 2'-O-methyladenosine-3'-phosphate ((2S,4R)-1-[29-[[2-(acetylamino)-2-deoxy-beta-D-galactopyra nosyl]oxy]-14,14-bis[[3-[[3-[[5-[[2-(acetylamino)-2-deoxy-b eta-D-galactopyranosyl]oxy]-1-oxopentyl]amino]propyl]amino] -3-oxopropoxy]methyl]-1,12,19,25-tetraoxo-16-oxa-13,20,24-t riazanonacos-1-yl]-4-hydroxy-2-pyrrolidinyl)methyl ester
tctgtgctcttcgtcatctga

SEQ ID NO: 1886 - RNA, 21 nt, synthetic construct
  source 1..21: mol_type = other RNA
  modified_base 1: mod_base = OTHER; note = 2'-O-methylcytidine-3'-phosphorothioate
  modified_base 2: mod_base = OTHER; note = 2'-O-methyluridine-3'-phosphorothioate
  modified_base 3: mod_base = OTHER; note = 2'-O-methylguanosine-3'-phosphate
  modified_base 4: mod_base = OTHER; note = 2'-O-methyluridine-3'-phosphate
  modified_base 5: mod_base = OTHER; note = 2'-O-methylguanosine-3'-phosphate
  modified_base 6: mod_base = OTHER; note = 2'-O-methylcytidine-3'-phosphate
  modified_base 7: mod_base = OTHER; note = 2'-deoxy-2'-fluorouridine-3'-phosphate
  modified_base 8: mod_base = OTHER; note = 2'-O-methylcytidine-3'-phosphate
  modified_base 9: mod_base = OTHER; note = 2'-deoxy-2'-fluorouridine-3'-phosphate
  modified_base 10: mod_base = OTHER; note = 2'-deoxy-2'-fluorouridine-3'-phosphate
  modified_base 11: mod_base = OTHER; note = 2'-deoxy-2'-fluorocytidine-3'-phosphate
  modified_base 12: mod_base = OTHER; note = 2'-O-methylguanosine-3'-phosphate
  modified_base 13: mod_base = OTHER; note = 2'-O-methyluridine-3'-phosphate
  modified_base 14: mod_base = OTHER; note = 2'-O-methylcytidine-3'-phosphate
  modified_base 15: mod_base = OTHER; note = 2'-O-methyladenosine-3'-phosphate
  modified_base 16: mod_base = OTHER; note = 2'-O-methyluridine-3'-phosphate
  modified_base 17: mod_base = OTHER; note = 2'-O-methylcytidine-3'-phosphate
  modified_base 18: mod_base = OTHER; note = 2'-O-methyluridine-3'-phosphate
  modified_base 19: mod_base = OTHER; note = 2'-O-methylguanosine-3'-phosphate
  modified_base 20: mod_base = OTHER; note = 2'-O-methyladenosine-3'-phosphate
  modified_base 21: mod_base = OTHER; note = 2'-O-methyladenosine-3'-phosphate ((2S,4R)-1-[29-[[2-(acetylamino)-2-deoxy-beta-D-galactopyra nosyl]oxy]-14,14-bis[[3-[[3-[[5-[[2-(acetylamino)-2-deoxy-b eta-D-galactopyranosyl]oxy]-1-oxopentyl]amino]propyl]amino] -3-oxopropoxy]methyl]-1,12,19,25-tetraoxo-16-oxa-13,20,24-t riazanonacos-1-yl]-4-hydroxy-2-pyrrolidinyl)methyl ester
ctgtgctcttcgtcatctgaa

SEQ ID NO: 1887 - RNA, 21 nt, synthetic construct
  source 1..21: mol_type = other RNA
  modified_base 1: mod_base = OTHER; note = 2'-O-methyluridine-3'-phosphorothioate
  modified_base 2: mod_base = OTHER; note = 2'-O-methylguanosine-3'-phosphorothioate
  modified_base 3: mod_base = OTHER; note = 2'-O-methyluridine-3'-phosphate
  modified_base 4: mod_base = OTHER; note = 2'-O-methylguanosine-3'-phosphate
  modified_base 5: mod_base = OTHER; note = 2'-O-methylcytidine-3'-phosphate
  modified_base 6: mod_base = OTHER; note = 2'-O-methyluridine-3'-phosphate
  modified_base 7: mod_base = OTHER; note = 2'-deoxy-2'-fluorocytidine-3'-phosphate
  modified_base 8: mod_base = OTHER; note = 2'-O-methyluridine-3'-phosphate
  modified_base 9: mod_base = OTHER; note = 2'-deoxy-2'-fluorouridine-3'-phosphate
  modified_base 10: mod_base = OTHER; note = 2'-deoxy-2'-fluorocytidine-3'-phosphate
  modified_base 11: mod_base = OTHER; note = 2'-deoxy-2'-fluoroguanosine-3'-phosphate
  modified_base 12: mod_base = OTHER; note = 2'-O-methyluridine-3'-phosphate
  modified_base 13: mod_base = OTHER; note = 2'-O-methylcytidine-3'-phosphate
  modified_base 14: mod_base = OTHER; note = 2'-O-methyladenosine-3'-phosphate
  modified_base 15: mod_base = OTHER; note = 2'-O-methyluridine-3'-phosphate
  modified_base 16: mod_base = OTHER; note = 2'-O-methylcytidine-3'-phosphate
  modified_base 17: mod_base = OTHER; note = 2'-O-methyluridine-3'-phosphate
  modified_base 18: mod_base = OTHER; note = 2'-O-methylguanosine-3'-phosphate
  modified_base 19: mod_base = OTHER; note = 2'-O-methyladenosine-3'-phosphate
  modified_base 20: mod_base = OTHER; note = 2'-O-methylcytidine-3'-phosphate
  modified_base 21: mod_base = OTHER; note = 2'-O-methyladenosine-3'-phosphate ((2S,4R)-1-[29-[[2-(acetylamino)-2-deoxy-beta-D-galactopyra nosyl]oxy]-14,14-bis[[3-[[3-[[5-[[2-(acetylamino)-2-deoxy-b eta-D-galactopyranosyl]oxy]-1-oxopentyl]amino]propyl]amino] -3-oxopropoxy]methyl]-1,12,19,25-tetraoxo-16-oxa-13,20,24-t riazanonacos-1-yl]-4-hydroxy-2-pyrrolidinyl)methyl ester
tgtgctcttcgtcatctgaca

SEQ ID NO: 1888 - RNA, 21 nt, synthetic construct
  source 1..21: mol_type = other RNA
  modified_base 1: mod_base = OTHER; note = 2'-O-methylguanosine-3'-phosphorothioate
  modified_base 2: mod_base = OTHER; note = 2'-O-methyluridine-3'-phosphorothioate
  modified_base 3: mod_base = OTHER; note = 2'-O-methylguanosine-3'-phosphate
  modified_base 4: mod_base = OTHER; note = 2'-O-methylcytidine-3'-phosphate
  modified_base 5: mod_base = OTHER; note = 2'-O-methyluridine-3'-phosphate
  modified_base 6: mod_base = OTHER; note = 2'-O-methylcytidine-3'-phosphate
  modified_base 7: mod_base = OTHER; note = 2'-deoxy-2'-fluorouridine-3'-phosphate
  modified_base 8: mod_base = OTHER; note = 2'-O-methyluridine-3'-phosphate
  modified_base 9: mod_base = OTHER; note = 2'-deoxy-2'-fluorocytidine-3'-phosphate
  modified_base 10: mod_base = OTHER; note = 2'-deoxy-2'-fluoroguanosine-3'-phosphate
  modified_base 11: mod_base = OTHER; note = 2'-deoxy-2'-fluorouridine-3'-phosphate
  modified_base 12: mod_base = OTHER; note = 2'-O-methylcytidine-3'-phosphate
  modified_base 13: mod_base = OTHER; note = 2'-O-methyladenosine-3'-phosphate
  modified_base 14: mod_base = OTHER; note = 2'-O-methyluridine-3'-phosphate
  modified_base 15: mod_base = OTHER; note = 2'-O-methylcytidine-3'-phosphate
  modified_base 16: mod_base = OTHER; note = 2'-O-methyluridine-3'-phosphate
  modified_base 17: mod_base = OTHER; note = 2'-O-methylguanosine-3'-phosphate
  modified_base 18: mod_base = OTHER; note = 2'-O-methyladenosine-3'-phosphate
  modified_base 19: mod_base = OTHER; note = 2'-O-methylcytidine-3'-phosphate
  modified_base 20: mod_base = OTHER; note = 2'-O-methylcytidine-3'-phosphate
  modified_base 21: mod_base = OTHER; note = 2'-O-methyladenosine-3'-phosphate ((2S,4R)-1-[29-[[2-(acetylamino)-2-deoxy-beta-D-galactopyra nosyl]oxy]-14,14-bis[[3-[[3-[[5-[[2-(acetylamino)-2-deoxy-b eta-D-galactopyranosyl]oxy]-1-oxopentyl]amino]propyl]amino] -3-oxopropoxy]methyl]-1,12,19,25-tetraoxo-16-oxa-13,20,24-t riazanonacos-1-yl]-4-hydroxy-2-pyrrolidinyl)methyl ester
gtgctcttcgtcatctgacca

SEQ ID NO: 1889 - RNA, 21 nt, synthetic construct
  source 1..21: mol_type = other RNA
  modified_base 1: mod_base = OTHER; note = 2'-O-methyladenosine-3'-phosphorothioate
  modified_base 2: mod_base = OTHER; note = 2'-O-methylcytidine-3'-phosphorothioate
  modified_base 3: mod_base = OTHER; note = 2'-O-methyluridine-3'-phosphate
  modified_base 4: mod_base = OTHER; note = 2'-O-methylguanosine-3'-phosphate
  modified_base 5: mod_base = OTHER; note = 2'-O-methyluridine-3'-phosphate
  modified_base 6: mod_base = OTHER; note = 2'-O-methyluridine-3'-phosphate
  modified_base 7: mod_base = OTHER; note = 2'-deoxy-2'-fluoroguanosine-3'-phosphate
  modified_base 8: mod_base = OTHER; note = 2'-O-methylguanosine-3'-phosphate
  modified_base 9: mod_base = OTHER; note = 2'-deoxy-2'-fluoroadenosine-3'-phosphate
  modified_base 10: mod_base = OTHER; note = 2'-deoxy-2'-fluorouridine-3'-phosphate
  modified_base 11: mod_base = OTHER; note = 2'-deoxy-2'-fluorouridine-3'-phosphate
  modified_base 12: mod_base = OTHER; note = 2'-O-methylguanosine-3'-phosphate
  modified_base 13: mod_base = OTHER; note = 2'-O-methyladenosine-3'-phosphate
  modified_base 14: mod_base = OTHER; note = 2'-O-methyluridine-3'-phosphate
  modified_base 15: mod_base = OTHER; note = 2'-O-methyluridine-3'-phosphate
  modified_base 16: mod_base = OTHER; note = 2'-O-methylcytidine-3'-phosphate
  modified_base 17: mod_base = OTHER; note = 2'-O-methylguanosine-3'-phosphate
  modified_base 18: mod_base = OTHER; note = 2'-O-methyladenosine-3'-phosphate
  modified_base 19: mod_base = OTHER; note = 2'-O-methyladenosine-3'-phosphate
  modified_base 20: mod_base = OTHER; note = 2'-O-methyladenosine-3'-phosphate
  modified_base 21: mod_base = OTHER; note = 2'-O-methyladenosine-3'-phosphate ((2S,4R)-1-[29-[[2-(acetylamino)-2-deoxy-beta-D-galactopyra nosyl]oxy]-14,14-bis[[3-[[3-[[5-[[2-(acetylamino)-2-deoxy-b eta-D-galactopyranosyl]oxy]-1-oxopentyl]amino]propyl]amino] -3-oxopropoxy]methyl]-1,12,19,25-tetraoxo-16-oxa-13,20,24-t riazanonacos-1-yl]-4-hydroxy-2-pyrrolidinyl)methyl ester
actgttggattgattcgaaaa

SEQ ID NO: 1890 - RNA, 21 nt, synthetic construct
  source 1..21: mol_type = other RNA
  modified_base 1: mod_base = OTHER; note = 2'-O-methyladenosine-3'-phosphorothioate
  modified_base 2: mod_base = OTHER; note = 2'-O-methyladenosine-3'-phosphorothioate
  modified_base 3: mod_base = OTHER; note = 2'-O-methyladenosine-3'-phosphate
  modified_base 4: mod_base = OTHER; note = 2'-O-methyluridine-3'-phosphate
  modified_base 5: mod_base = OTHER; note = 2'-O-methyladenosine-3'-phosphate
  modified_base 6: mod_base = OTHER; note = 2'-O-methylcytidine-3'-phosphate
  modified_base 7: mod_base = OTHER; note = 2'-deoxy-2'-fluorocytidine-3'-phosphate
  modified_base 8: mod_base = OTHER; note = 2'-O-methyladenosine-3'-phosphate
  modified_base 9: mod_base = OTHER; note = 2'-deoxy-2'-fluorouridine-3'-phosphate
  modified_base 10: mod_base = OTHER; note = 2'-deoxy-2'-fluorouridine-3'-phosphate
  modified_base 11: mod_base = OTHER; note = 2'-deoxy-2'-fluorocytidine-3'-phosphate
  modified_base 12: mod_base = OTHER; note = 2'-O-methylcytidine-3'-phosphate
  modified_base 13: mod_base = OTHER; note = 2'-O-methyladenosine-3'-phosphate
  modified_base 14: mod_base = OTHER; note = 2'-O-methyluridine-3'-phosphate
  modified_base 15: mod_base = OTHER; note = 2'-O-methyluridine-3'-phosphate
  modified_base 16: mod_base = OTHER; note = 2'-O-methylguanosine-3'-phosphate
  modified_base 17: mod_base = OTHER; note = 2'-O-methyluridine-3'-phosphate
  modified_base 18: mod_base = OTHER; note = 2'-O-methyluridine-3'-phosphate
  modified_base 19: mod_base = OTHER; note = 2'-O-methyluridine-3'-phosphate
  modified_base 20: mod_base = OTHER; note = 2'-O-methylguanosine-3'-phosphate
  modified_base 21: mod_base = OTHER; note = 2'-O-methyladenosine-3'-phosphate ((2S,4R)-1-[29-[[2-(acetylamino)-2-deoxy-beta-D-galactopyra nosyl]oxy]-14,14-bis[[3-[[3-[[5-[[2-(acetylamino)-2-deoxy-b eta-D-galactopyranosyl]oxy]-1-oxopentyl]amino]propyl]amino] -3-oxopropoxy]methyl]-1,12,19,25-tetraoxo-16-oxa-13,20,24-t riazanonacos-1-yl]-4-hydroxy-2-pyrrolidinyl)methyl ester
aaataccattccattgtttga

SEQ ID NO: 1891 - RNA, 21 nt, synthetic construct
  source 1..21: mol_type = other RNA
  modified_base 1: mod_base = OTHER; note = 2'-O-methyluridine-3'-phosphorothioate
  modified_base 2: mod_base = OTHER; note = 2'-O-methyladenosine-3'-phosphorothioate
  modified_base 3: mod_base = OTHER; note = 2'-O-methylcytidine-3'-phosphate
  modified_base 4: mod_base = OTHER; note = 2'-O-methylcytidine-3'-phosphate
  modified_base 5: mod_base = OTHER; note = 2'-O-methyladenosine-3'-phosphate
  modified_base 6: mod_base = OTHER; note = 2'-O-methyluridine-3'-phosphate
  modified_base 7: mod_base = OTHER; note = 2'-deoxy-2'-fluorouridine-3'-phosphate
  modified_base 8: mod_base = OTHER; note = 2'-O-methylcytidine-3'-phosphate
  modified_base 9: mod_base = OTHER; note = 2'-deoxy-2'-fluorocytidine-3'-phosphate
  modified_base 10: mod_base = OTHER; note = 2'-deoxy-2'-fluoroadenosine-3'-phosphate
  modified_base 11: mod_base = OTHER; note = 2'-deoxy-2'-fluorouridine-3'-phosphate
  modified_base 12: mod_base = OTHER; note = 2'-O-methyluridine-3'-phosphate
  modified_base 13: mod_base = OTHER; note = 2'-O-methylguanosine-3'-phosphate
  modified_base 14: mod_base = OTHER; note = 2'-O-methyluridine-3'-phosphate
  modified_base 15: mod_base = OTHER; note = 2'-O-methyluridine-3'-phosphate
  modified_base 16: mod_base = OTHER; note = 2'-O-methyluridine-3'-phosphate
  modified_base 17: mod_base = OTHER; note = 2'-O-methylguanosine-3'-phosphate
  modified_base 18: mod_base = OTHER; note = 2'-O-methyluridine-3'-phosphate
  modified_base 19: mod_base = OTHER; note = 2'-O-methylguanosine-3'-phosphate
  modified_base 20: mod_base = OTHER; note = 2'-O-methylcytidine-3'-phosphate
  modified_base 21: mod_base = OTHER; note = 2'-O-methyladenosine-3'-phosphate ((2S,4R)-1-[29-[[2-(acetylamino)-2-deoxy-beta-D-galactopyra nosyl]oxy]-14,14-bis[[3-[[3-[[5-[[2-(acetylamino)-2-deoxy-b eta-D-galactopyranosyl]oxy]-1-oxopentyl]amino]propyl]amino] -3-oxopropoxy]methyl]-1,12,19,25-tetraoxo-16-oxa-13,20,24-t riazanonacos-1-yl]-4-hydroxy-2-pyrrolidinyl)methyl ester
taccattccattgtttgtgca

SEQ ID NO: 1892 - RNA, 21 nt, synthetic construct
  source 1..21: mol_type = other RNA
  modified_base 1: mod_base = OTHER; note = 2'-O-methylcytidine-3'-phosphorothioate
  modified_base 2: mod_base = OTHER; note = 2'-O-methylcytidine-3'-phosphorothioate
  modified_base 3: mod_base = OTHER; note = 2'-O-methyladenosine-3'-phosphate
  modified_base 4: mod_base = OTHER; note = 2'-O-methyluridine-3'-phosphate
  modified_base 5: mod_base = OTHER; note = 2'-O-methyluridine-3'-phosphate
  modified_base 6: mod_base = OTHER; note = 2'-O-methylcytidine-3'-phosphate
  modified_base 7: mod_base = OTHER; note = 2'-deoxy-2'-fluorocytidine-3'-phosphate
  modified_base 8: mod_base = OTHER; note = 2'-O-methyladenosine-3'-phosphate
  modified_base 9: mod_base = OTHER; note = 2'-deoxy-2'-fluorouridine-3'-phosphate
  modified_base 10: mod_base = OTHER; note = 2'-deoxy-2'-fluorouridine-3'-phosphate
  modified_base 11: mod_base = OTHER; note = 2'-deoxy-2'-fluoroguanosine-3'-phosphate
  modified_base 12: mod_base = OTHER; note = 2'-O-methyluridine-3'-phosphate
  modified_base 13: mod_base = OTHER; note = 2'-O-methyluridine-3'-phosphate
  modified_base 14: mod_base = OTHER; note = 2'-O-methyluridine-3'-phosphate
  modified_base 15: mod_base = OTHER; note = 2'-O-methylguanosine-3'-phosphate
  modified_base 16: mod_base = OTHER; note = 2'-O-methyluridine-3'-phosphate
  modified_base 17: mod_base = OTHER; note = 2'-O-methylguanosine-3'-phosphate
  modified_base 18: mod_base = OTHER; note = 2'-O-methylcytidine-3'-phosphate
  modified_base 19: mod_base = OTHER; note = 2'-O-methyladenosine-3'-phosphate
  modified_base 20: mod_base = OTHER; note = 2'-O-methylguanosine-3'-phosphate
  modified_base 21: mod_base = OTHER; note = 2'-O-methyladenosine-3'-phosphate ((2S,4R)-1-[29-[[2-(acetylamino)-2-deoxy-beta-D-galactopyra nosyl]oxy]-14,14-bis[[3-[[3-[[5-[[2-(acetylamino)-2-deoxy-b eta-D-galactopyranosyl]oxy]-1-oxopentyl]amino]propyl]amino] -3-oxopropoxy]methyl]-1,12,19,25-tetraoxo-16-oxa-13,20,24-t riazanonacos-1-yl]-4-hydroxy-2-pyrrolidinyl)methyl ester
ccattccattgtttgtgcaga

SEQ ID NO: 1893 - RNA, 21 nt, synthetic construct
  source 1..21: mol_type = other RNA
  modified_base 1: mod_base = OTHER; note = 2'-O-methylguanosine-3'-phosphorothioate
  modified_base 2: mod_base = OTHER; note = 2'-O-methyluridine-3'-phosphorothioate
  modified_base 3: mod_base = OTHER; note = 2'-O-methylcytidine-3'-phosphate
  modified_base 4: mod_base = OTHER; note = 2'-O-methylcytidine-3'-phosphate
  modified_base 5: mod_base = OTHER; note = 2'-O-methyluridine-3'-phosphate
  modified_base 6: mod_base = OTHER; note = 2'-O-methylcytidine-3'-phosphate
  modified_base 7: mod_base = OTHER; note = 2'-deoxy-2'-fluorouridine-3'-phosphate
  modified_base 8: mod_base = OTHER; note = 2'-O-methylguanosine-3'-phosphate
  modified_base 9: mod_base = OTHER; note = 2'-deoxy-2'-fluorouridine-3'-phosphate
  modified_base 10: mod_base = OTHER; note = 2'-deoxy-2'-fluoroguanosine-3'-phosphate
  modified_base 11: mod_base = OTHER; note = 2'-deoxy-2'-fluoroadenosine-3'-phosphate
  modified_base 12: mod_base = OTHER; note = 2'-O-methyladenosine-3'-phosphate
  modified_base 13: mod_base = OTHER; note = 2'-O-methylcytidine-3'-phosphate
  modified_base 14: mod_base = OTHER; note = 2'-O-methyluridine-3'-phosphate
  modified_base 15: mod_base = OTHER; note = 2'-O-methyluridine-3'-phosphate
  modified_base 16: mod_base = OTHER; note = 2'-O-methylguanosine-3'-phosphate
  modified_base 17: mod_base = OTHER; note = 2'-O-methylcytidine-3'-phosphate
  modified_base 18: mod_base = OTHER; note = 2'-O-methyluridine-3'-phosphate
  modified_base 19: mod_base = OTHER; note = 2'-O-methylcytidine-3'-phosphate
  modified_base 20: mod_base = OTHER; note = 2'-O-methyladenosine-3'-phosphate
  modified_base 21: mod_base = OTHER; note = 2'-O-methyladenosine-3'-phosphate ((2S,4R)-1-[29-[[2-(acetylamino)-2-deoxy-beta-D-galactopyra nosyl]oxy]-14,14-bis[[3-[[3-[[5-[[2-(acetylamino)-2-deoxy-b eta-D-galactopyranosyl]oxy]-1-oxopentyl]amino]propyl]amino] -3-oxopropoxy]methyl]-1,12,19,25-tetraoxo-16-oxa-13,20,24-t riazanonacos-1-yl]-4-hydroxy-2-pyrrolidinyl)methyl ester
gtcctctgtgaacttgctcaa

SEQ ID NO: 1894 - RNA, 21 nt, synthetic construct
  source 1..21: mol_type = other RNA
  modified_base 1: mod_base = OTHER; note = 2'-O-methyluridine-3'-phosphorothioate
  modified_base 2: mod_base = OTHER; note = 2'-O-methylcytidine-3'-phosphorothioate
  modified_base 3: mod_base = OTHER; note = 2'-O-methylcytidine-3'-phosphate
  modified_base 4: mod_base = OTHER; note = 2'-O-methyluridine-3'-phosphate
  modified_base 5: mod_base = OTHER; note = 2'-O-methylcytidine-3'-phosphate
  modified_base 6: mod_base = OTHER; note = 2'-O-methyluridine-3'-phosphate
  modified_base 7: mod_base = OTHER; note = 2'-deoxy-2'-fluoroguanosine-3'-phosphate
  modified_base 8: mod_base = OTHER; note = 2'-O-methyluridine-3'-phosphate
  modified_base 9: mod_base = OTHER; note = 2'-deoxy-2'-fluoroguanosine-3'-phosphate
  modified_base 10: mod_base = OTHER; note = 2'-deoxy-2'-fluoroadenosine-3'-phosphate
  modified_base 11: mod_base = OTHER; note = 2'-deoxy-2'-fluoroadenosine-3'-phosphate
  modified_base 12: mod_base = OTHER; note = 2'-O-methylcytidine-3'-phosphate
  modified_base 13: mod_base = OTHER; note = 2'-O-methyluridine-3'-phosphate
  modified_base 14: mod_base = OTHER; note = 2'-O-methyluridine-3'-phosphate
  modified_base 15: mod_base = OTHER; note = 2'-O-methylguanosine-3'-phosphate
  modified_base 16: mod_base = OTHER; note = 2'-O-methylcytidine-3'-phosphate
  modified_base 17: mod_base = OTHER; note = 2'-O-methyluridine-3'-phosphate
  modified_base 18: mod_base = OTHER; note = 2'-O-methylcytidine-3'-phosphate
  modified_base 19: mod_base = OTHER; note = 2'-O-methyladenosine-3'-phosphate
  modified_base 20: mod_base = OTHER; note = 2'-O-methylguanosine-3'-phosphate
  modified_base 21: mod_base = OTHER; note = 2'-O-methyladenosine-3'-phosphate ((2S,4R)-1-[29-[[2-(acetylamino)-2-deoxy-beta-D-galactopyra nosyl]oxy]-14,14-bis[[3-[[3-[[5-[[2-(acetylamino)-2-deoxy-b eta-D-galactopyranosyl]oxy]-1-oxopentyl]amino]propyl]amino] -3-oxopropoxy]methyl]-1,12,19,25-tetraoxo-16-oxa-13,20,24-t riazanonacos-1-yl]-4-hydroxy-2-pyrrolidinyl)methyl ester
tcctctgtgaacttgctcaga

SEQ ID NO: 1895 - RNA, 21 nt, synthetic construct
  source 1..21: mol_type = other RNA
  modified_base 1: mod_base = OTHER; note = 2'-O-methyladenosine-3'-phosphorothioate
  modified_base 2: mod_base = OTHER; note = 2'-O-methyluridine-3'-phosphorothioate
  modified_base 3: mod_base = OTHER; note = 2'-O-methylcytidine-3'-phosphate
  modified_base 4: mod_base = OTHER; note = 2'-O-methylguanosine-3'-phosphate
  modified_base 5: mod_base = OTHER; note = 2'-O-methyluridine-3'-phosphate
  modified_base 6: mod_base = OTHER; note = 2'-O-methyluridine-3'-phosphate
  modified_base 7: mod_base = OTHER; note = 2'-deoxy-2'-fluorocytidine-3'-phosphate
  modified_base 8: mod_base = OTHER; note = 2'-O-methyluridine-3'-phosphate
  modified_base 9: mod_base = OTHER; note = 2'-deoxy-2'-fluorouridine-3'-phosphate
  modified_base 10: mod_base = OTHER; note = 2'-deoxy-2'-fluorouridine-3'-phosphate
  modified_base 11: mod_base = OTHER; note = 2'-deoxy-2'-fluorouridine-3'-phosphate
  modified_base 12: mod_base = OTHER; note = 2'-O-methylcytidine-3'-phosphate
  modified_base 13: mod_base = OTHER; note = 2'-O-methyladenosine-3'-phosphate
  modified_base 14: mod_base = OTHER; note = 2'-O-methylcytidine-3'-phosphate
  modified_base 15: mod_base = OTHER; note = 2'-O-methyluridine-3'-phosphate
  modified_base 16: mod_base = OTHER; note = 2'-O-methylcytidine-3'-phosphate
  modified_base 17: mod_base = OTHER; note = 2'-O-methyluridine-3'-phosphate
  modified_base 18: mod_base = OTHER; note = 2'-O-methylguanosine-3'-phosphate
  modified_base 19: mod_base = OTHER; note = 2'-O-methylguanosine-3'-phosphate
  modified_base 20: mod_base = OTHER; note = 2'-O-methyluridine-3'-phosphate
  modified_base 21: mod_base = OTHER; note = 2'-O-methyladenosine-3'-phosphate ((2S,4R)-1-[29-[[2-(acetylamino)-2-deoxy-beta-D-galactopyra nosyl]oxy]-14,14-bis[[3-[[3-[[5-[[2-(acetylamino)-2-deoxy-b eta-D-galactopyranosyl]oxy]-1-oxopentyl]amino]propyl]amino] -3-oxopropoxy]methyl]-1,12,19,25-tetraoxo-16-oxa-13,20,24-t riazanonacos-1-yl]-4-hydroxy-2-pyrrolidinyl)methyl ester
atcgttcttttcactctggta

SEQ ID NO: 1896 - RNA, 21 nt, synthetic construct
  source 1..21: mol_type = other RNA
  modified_base 1: mod_base = OTHER; note = 2'-O-methyluridine-3'-phosphorothioate
  modified_base 2: mod_base = OTHER; note = 2'-O-methylcytidine-3'-phosphorothioate
  modified_base 3: mod_base = OTHER; note = 2'-O-methylguanosine-3'-phosphate
  modified_base 4: mod_base = OTHER; note = 2'-O-methyluridine-3'-phosphate
  modified_base 5: mod_base = OTHER; note = 2'-O-methyluridine-3'-phosphate
  modified_base 6: mod_base = OTHER; note = 2'-O-methylcytidine-3'-phosphate
  modified_base 7: mod_base = OTHER; note = 2'-deoxy-2'-fluorouridine-3'-phosphate
  modified_base 8: mod_base = OTHER; note = 2'-O-methyluridine-3'-phosphate
  modified_base 9: mod_base = OTHER; note = 2'-deoxy-2'-fluorouridine-3'-phosphate
  modified_base 10: mod_base = OTHER; note = 2'-deoxy-2'-fluorouridine-3'-phosphate
  modified_base 11: mod_base = OTHER; note = 2'-deoxy-2'-fluorocytidine-3'-phosphate
  modified_base 12: mod_base = OTHER; note = 2'-O-methyladenosine-3'-phosphate
  modified_base 13: mod_base = OTHER; note = 2'-O-methylcytidine-3'-phosphate
  modified_base 14: mod_base = OTHER; note = 2'-O-methyluridine-3'-phosphate
  modified_base 15: mod_base = OTHER; note = 2'-O-methylcytidine-3'-phosphate
  modified_base 16: mod_base = OTHER; note = 2'-O-methyluridine-3'-phosphate
  modified_base 17: mod_base = OTHER; note = 2'-O-methylguanosine-3'-phosphate
  modified_base 18: mod_base = OTHER; note = 2'-O-methylguanosine-3'-phosphate
  modified_base 19: mod_base = OTHER; note = 2'-O-methyluridine-3'-phosphate
  modified_base 20: mod_base = OTHER; note = 2'-O-methylguanosine-3'-phosphate
  modified_base 21: mod_base = OTHER; note = 2'-O-methyladenosine-3'-phosphate ((2S,4R)-1-[29-[[2-(acetylamino)-2-deoxy-beta-D-galactopyra nosyl]oxy]-14,14-bis[[3-[[3-[[5-[[2-(acetylamino)-2-deoxy-b eta-D-galactopyranosyl]oxy]-1-oxopentyl]amino]propyl]amino] -3-oxopropoxy]methyl]-1,12,19,25-tetraoxo-16-oxa-13,20,24-t riazanonacos-1-yl]-4-hydroxy-2-pyrrolidinyl)methyl ester
tcgttcttttcactctggtga

SEQ ID NO: 1897 - RNA, 21 nt, synthetic construct
  source 1..21: mol_type = other RNA
  modified_base 1: mod_base = OTHER; note = 2'-O-methyluridine-3'-phosphorothioate
  modified_base 2: mod_base = OTHER; note = 2'-O-methylguanosine-3'-phosphorothioate
  modified_base 3: mod_base = OTHER; note = 2'-O-methylguanosine-3'-phosphate
  modified_base 4: mod_base = OTHER; note = 2'-O-methyluridine-3'-phosphate
  modified_base 5: mod_base = OTHER; note = 2'-O-methylguanosine-3'-phosphate
  modified_base 6: mod_base = OTHER; note = 2'-O-methylcytidine-3'-phosphate
  modified_base 7: mod_base = OTHER; note = 2'-deoxy-2'-fluorouridine-3'-phosphate
  modified_base 8: mod_base = OTHER; note = 2'-O-methylguanosine-3'-phosphate
  modified_base 9: mod_base = OTHER; note = 2'-deoxy-2'-fluoroadenosine-3'-phosphate
  modified_base 10: mod_base = OTHER; note = 2'-deoxy-2'-fluorocytidine-3'-phosphate
  modified_base 11: mod_base = OTHER; note = 2'-deoxy-2'-fluorouridine-3'-phosphate
  modified_base 12: mod_base = OTHER; note = 2'-O-methyladenosine-3'-phosphate
  modified_base 13: mod_base = OTHER; note = 2'-O-methyluridine-3'-phosphate
  modified_base 14: mod_base = OTHER; note = 2'-O-methylcytidine-3'-phosphate
  modified_base 15: mod_base = OTHER; note = 2'-O-methylcytidine-3'-phosphate
  modified_base 16: mod_base = OTHER; note = 2'-O-methyladenosine-3'-phosphate
  modified_base 17: mod_base = OTHER; note = 2'-O-methylguanosine-3'-phosphate
  modified_base 18: mod_base = OTHER; note = 2'-O-methyluridine-3'-phosphate
  modified_base 19: mod_base = OTHER; note = 2'-O-methyluridine-3'-phosphate
  modified_base 20: mod_base = OTHER; note = 2'-O-methylguanosine-3'-phosphate
  modified_base 21: mod_base = OTHER; note = 2'-O-methyladenosine-3'-phosphate ((2S,4R)-1-[29-[[2-(acetylamino)-2-deoxy-beta-D-galactopyra nosyl]oxy]-14,14-bis[[3-[[3-[[5-[[2-(acetylamino)-2-deoxy-b eta-D-galactopyranosyl]oxy]-1-oxopentyl]amino]propyl]amino] -3-oxopropoxy]methyl]-1,12,19,25-tetraoxo-16-oxa-13,20,24-t riazanonacos-1-yl]-4-hydroxy-2-pyrrolidinyl)methyl ester
tggtgctgactatccagttga

SEQ ID NO: 1898 - RNA, 21 nt, synthetic construct
  source 1..21: mol_type = other RNA
  modified_base 1: mod_base = OTHER; note = 2'-O-methylguanosine-3'-phosphorothioate
  modified_base 2: mod_base = OTHER; note = 2'-O-methylcytidine-3'-phosphorothioate
  modified_base 3: mod_base = OTHER; note = 2'-O-methyluridine-3'-phosphate
  modified_base 4: mod_base = OTHER; note = 2'-O-methylguanosine-3'-phosphate
  modified_base 5: mod_base = OTHER; note = 2'-O-methyladenosine-3'-phosphate
  modified_base 6: mod_base = OTHER; note = 2'-O-methylcytidine-3'-phosphate
  modified_base 7: mod_base = OTHER; note = 2'-deoxy-2'-fluorouridine-3'-phosphate
  modified_base 8: mod_base = OTHER; note = 2'-O-methyladenosine-3'-phosphate
  modified_base 9: mod_base = OTHER; note = 2'-deoxy-2'-fluorouridine-3'-phosphate
  modified_base 10: mod_base = OTHER; note = 2'-deoxy-2'-fluorocytidine-3'-phosphate
  modified_base 11: mod_base = OTHER; note = 2'-deoxy-2'-fluorocytidine-3'-phosphate
  modified_base 12: mod_base = OTHER; note = 2'-O-methyladenosine-3'-phosphate
  modified_base 13: mod_base = OTHER; note = 2'-O-methylguanosine-3'-phosphate
  modified_base 14: mod_base = OTHER; note = 2'-O-methyluridine-3'-phosphate
  modified_base 15: mod_base = OTHER; note = 2'-O-methyluridine-3'-phosphate
  modified_base 16: mod_base = OTHER; note = 2'-O-methylguanosine-3'-phosphate
  modified_base 17: mod_base = OTHER; note = 2'-O-methyladenosine-3'-phosphate
  modified_base 18: mod_base = OTHER; note = 2'-O-methyluridine-3'-phosphate
  modified_base 19: mod_base = OTHER; note = 2'-O-methylguanosine-3'-phosphate
  modified_base 20: mod_base = OTHER; note = 2'-O-methylguanosine-3'-phosphate
  modified_base 21: mod_base = OTHER; note = 2'-O-methyladenosine-3'-phosphate ((2S,4R)-1-[29-[[2-(acetylamino)-2-deoxy-beta-D-galactopyra nosyl]oxy]-14,14-bis[[3-[[3-[[5-[[2-(acetylamino)-2-deoxy-b eta-D-galactopyranosyl]oxy]-1-oxopentyl]amino]propyl]amino] -3-oxopropoxy]methyl]-1,12,19,25-tetraoxo-16-oxa-13,20,24-t riazanonacos-1-yl]-4-hydroxy-2-pyrrolidinyl)methyl ester
gctgactatccagttgatgga

SEQ ID NO: 1899 - RNA, 21 nt, synthetic construct
  source 1..21: mol_type = other RNA
  modified_base 1: mod_base = OTHER; note = 2'-O-methylcytidine-3'-phosphorothioate
  modified_base 2: mod_base = OTHER; note = 2'-O-methyluridine-3'-phosphorothioate
  modified_base 3: mod_base = OTHER; note = 2'-O-methylguanosine-3'-phosphate
  modified_base 4: mod_base = OTHER; note = 2'-O-methyladenosine-3'-phosphate
  modified_base 5: mod_base = OTHER; note = 2'-O-methylcytidine-3'-phosphate
  modified_base 6: mod_base = OTHER; note = 2'-O-methyluridine-3'-phosphate
  modified_base 7: mod_base = OTHER; note = 2'-deoxy-2'-fluoroadenosine-3'-phosphate
  modified_base 8: mod_base = OTHER; note = 2'-O-methyluridine-3'-phosphate
  modified_base 9: mod_base = OTHER; note = 2'-deoxy-2'-fluorocytidine-3'-phosphate
  modified_base 10: mod_base = OTHER; note = 2'-deoxy-2'-fluorocytidine-3'-phosphate
  modified_base 11: mod_base = OTHER; note = 2'-deoxy-2'-fluoroadenosine-3'-phosphate
  modified_base 12: mod_base = OTHER; note = 2'-O-methylguanosine-3'-phosphate
  modified_base 13: mod_base = OTHER; note = 2'-O-methyluridine-3'-phosphate
  modified_base 14: mod_base = OTHER; note = 2'-O-methyluridine-3'-phosphate
  modified_base 15: mod_base = OTHER; note = 2'-O-methylguanosine-3'-phosphate
  modified_base 16: mod_base = OTHER; note = 2'-O-methyladenosine-3'-phosphate
  modified_base 17: mod_base = OTHER; note = 2'-O-methyluridine-3'-phosphate
  modified_base 18: mod_base = OTHER; note = 2'-O-methylguanosine-3'-phosphate
  modified_base 19: mod_base = OTHER; note = 2'-O-methylguanosine-3'-phosphate
  modified_base 20: mod_base = OTHER; note = 2'-O-methylguanosine-3'-phosphate
  modified_base 21: mod_base = OTHER; note = 2'-O-methyladenosine-3'-phosphate ((2S,4R)-1-[29-[[2-(acetylamino)-2-deoxy-beta-D-galactopyra nosyl]oxy]-14,14-bis[[3-[[3-[[5-[[2-(acetylamino)-2-deoxy-b eta-D-galactopyranosyl]oxy]-1-oxopentyl]amino]propyl]amino] -3-oxopropoxy]methyl]-1,12,19,25-tetraoxo-16-oxa-13,20,24-t riazanonacos-1-yl]-4-hydroxy-2-pyrrolidinyl)methyl ester
ctgactatccagttgatggga

SEQ ID NO: 1900 - RNA, 21 nt, synthetic construct
  source 1..21: mol_type = other RNA
  modified_base 1: mod_base = OTHER; note = 2'-O-methylguanosine-3'-phosphorothioate
  modified_base 2: mod_base = OTHER; note = 2'-O-methyladenosine-3'-phosphorothioate
  modified_base 3: mod_base = OTHER; note = 2'-O-methylcytidine-3'-phosphate
  modified_base 4: mod_base = OTHER; note = 2'-O-methyluridine-3'-phosphate
  modified_base 5: mod_base = OTHER; note = 2'-O-methyladenosine-3'-phosphate
  modified_base 6: mod_base = OTHER; note = 2'-O-methyluridine-3'-phosphate
  modified_base 7: mod_base = OTHER; note = 2'-deoxy-2'-fluorocytidine-3'-phosphate
  modified_base 8: mod_base = OTHER; note = 2'-O-methylcytidine-3'-phosphate
  modified_base 9: mod_base = OTHER; note = 2'-deoxy-2'-fluoroadenosine-3'-phosphate
  modified_base 10: mod_base = OTHER; note = 2'-deoxy-2'-fluoroguanosine-3'-phosphate
  modified_base 11: mod_base = OTHER; note = 2'-deoxy-2'-fluorouridine-3'-phosphate
  modified_base 12: mod_base = OTHER; note = 2'-O-methyluridine-3'-phosphate
  modified_base 13: mod_base = OTHER; note = 2'-O-methylguanosine-3'-phosphate
  modified_base 14: mod_base = OTHER; note = 2'-O-methyladenosine-3'-phosphate
  modified_base 15: mod_base = OTHER; note = 2'-O-methyluridine-3'-phosphate
  modified_base 16: mod_base = OTHER; note = 2'-O-methylguanosine-3'-phosphate
  modified_base 17: mod_base = OTHER; note = 2'-O-methylguanosine-3'-phosphate
  modified_base 18: mod_base = OTHER; note = 2'-O-methylguanosine-3'-phosphate
  modified_base 19: mod_base = OTHER; note = 2'-O-methylcytidine-3'-phosphate
  modified_base 20: mod_base = OTHER; note = 2'-O-methyluridine-3'-phosphate
  modified_base 21: mod_base = OTHER; note = 2'-O-methyladenosine-3'-phosphate ((2S,4R)-1-[29-[[2-(acetylamino)-2-deoxy-beta-D-galactopyra nosyl]oxy]-14,14-bis[[3-[[3-[[5-[[2-(acetylamino)-2-deoxy-b eta-D-galactopyranosyl]oxy]-1-oxopentyl]amino]propyl]amino] -3-oxopropoxy]methyl]-1,12,19,25-tetraoxo-16-oxa-13,20,24-t riazanonacos-1-yl]-4-hydroxy-2-pyrrolidinyl)methyl ester
gactatccagttgatgggcta

SEQ ID NO: 1901 - RNA, 21 nt, synthetic construct
  source 1..21: mol_type = other RNA
  modified_base 1: mod_base = OTHER; note = 2'-O-methyladenosine-3'-phosphorothioate
  modified_base 2: mod_base = OTHER; note = 2'-O-methyluridine-3'-phosphorothioate
  modified_base 3: mod_base = OTHER; note = 2'-O-methyluridine-3'-phosphate
  modified_base 4: mod_base = OTHER; note = 2'-O-methylguanosine-3'-phosphate
  modified_base 5: mod_base = OTHER; note = 2'-O-methylguanosine-3'-phosphate
  modified_base 6: mod_base = OTHER; note = 2'-O-methylcytidine-3'-phosphate
  modified_base 7: mod_base = OTHER; note = 2'-deoxy-2'-fluorocytidine-3'-phosphate
  modified_base 8: mod_base = OTHER; note = 2'-O-methyluridine-3'-phosphate
  modified_base 9: mod_base = OTHER; note = 2'-deoxy-2'-fluoroguanosine-3'-phosphate
  modified_base 10: mod_base = OTHER; note = 2'-deoxy-2'-fluorouridine-3'-phosphate
  modified_base 11: mod_base = OTHER; note = 2'-deoxy-2'-fluoroadenosine-3'-phosphate
  modified_base 12: mod_base = OTHER; note = 2'-O-methylguanosine-3'-phosphate
  modified_base 13: mod_base = OTHER; note = 2'-O-methyladenosine-3'-phosphate
  modified_base 14: mod_base = OTHER; note = 2'-O-methylguanosine-3'-phosphate
  modified_base 15: mod_base = OTHER; note = 2'-O-methyluridine-3'-phosphate
  modified_base 16: mod_base = OTHER; note = 2'-O-methyluridine-3'-phosphate
  modified_base 17: mod_base = OTHER; note = 2'-O-methylguanosine-3'-phosphate
  modified_base 18: mod_base = OTHER; note = 2'-O-methylcytidine-3'-phosphate
  modified_base 19: mod_base = OTHER; note = 2'-O-methyluridine-3'-phosphate
  modified_base 20: mod_base = OTHER; note = 2'-O-methylguanosine-3'-phosphate
  modified_base 21: mod_base = OTHER; note = 2'-O-methyladenosine-3'-phosphate ((2S,4R)-1-[29-[[2-(acetylamino)-2-deoxy-beta-D-galactopyra nosyl]oxy]-14,14-bis[[3-[[3-[[5-[[2-(acetylamino)-2-deoxy-b eta-D-galactopyranosyl]oxy]-1-oxopentyl]amino]propyl]amino] -3-oxopropoxy]methyl]-1,12,19,25-tetraoxo-16-oxa-13,20,24-t riazanonacos-1-yl]-4-hydroxy-2-pyrrolidinyl)methyl ester
attggcctgtagagttgctga

SEQ ID NO: 1902 - RNA, 21 nt, synthetic construct
  source 1..21: mol_type = other RNA
  modified_base 1: mod_base = OTHER; note = 2'-O-methylguanosine-3'-phosphorothioate
  modified_base 2: mod_base = OTHER; note = 2'-O-methylguanosine-3'-phosphorothioate
  modified_base 3: mod_base = OTHER; note = 2'-O-methylcytidine-3'-phosphate
  modified_base 4: mod_base = OTHER; note = 2'-O-methyluridine-3'-phosphate
  modified_base 5: mod_base = OTHER; note = 2'-O-methylguanosine-3'-phosphate
  modified_base 6: mod_base = OTHER; note = 2'-O-methylguanosine-3'-phosphate
  modified_base 7: mod_base = OTHER; note = 2'-deoxy-2'-fluorouridine-3'-phosphate
  modified_base 8: mod_base = OTHER; note = 2'-O-methyladenosine-3'-phosphate
  modified_base 9: mod_base = OTHER; note = 2'-deoxy-2'-fluorouridine-3'-phosphate
  modified_base 10: mod_base = OTHER; note = 2'-deoxy-2'-fluorocytidine-3'-phosphate
  modified_base 11: mod_base = OTHER; note = 2'-deoxy-2'-fluorouridine-3'-phosphate
  modified_base 12: mod_base = OTHER; note = 2'-O-methylcytidine-3'-phosphate
  modified_base 13: mod_base = OTHER; note = 2'-O-methyladenosine-3'-phosphate
  modified_base 14: mod_base = OTHER; note = 2'-O-methylguanosine-3'-phosphate
  modified_base 15: mod_base = OTHER; note = 2'-O-methyladenosine-3'-phosphate
  modified_base 16: mod_base = OTHER; note = 2'-O-methyladenosine-3'-phosphate
  modified_base 17: mod_base = OTHER; note = 2'-O-methyladenosine-3'-phosphate
  modified_base 18: mod_base = OTHER; note = 2'-O-methylguanosine-3'-phosphate
  modified_base 19: mod_base = OTHER; note = 2'-O-methyluridine-3'-phosphate
  modified_base 20: mod_base = OTHER; note = 2'-O-methylguanosine-3'-phosphate
  modified_base 21: mod_base = OTHER; note = 2'-O-methyladenosine-3'-phosphate ((2S,4R)-1-[29-[[2-(acetylamino)-2-deoxy-beta-D-galactopyra nosyl]oxy]-14,14-bis[[3-[[3-[[5-[[2-(acetylamino)-2-deoxy-b eta-D-galactopyranosyl]oxy]-1-oxopentyl]amino]propyl]amino] -3-oxopropoxy]methyl]-1,12,19,25-tetraoxo-16-oxa-13,20,24-t riazanonacos-1-yl]-4-hydroxy-2-pyrrolidinyl)methyl ester
ggctggtatctcagaaagtga

SEQ ID NO: 1903 - RNA, 21 nt, synthetic construct
  source 1..21: mol_type = other RNA
  modified_base 1: mod_base = OTHER; note = 2'-O-methylguanosine-3'-phosphorothioate
  modified_base 2: mod_base = OTHER; note = 2'-O-methylcytidine-3'-phosphorothioate
  modified_base 3: mod_base = OTHER; note = 2'-O-methyluridine-3'-phosphate
  modified_base 4: mod_base = OTHER; note = 2'-O-methylguanosine-3'-phosphate
  modified_base 5: mod_base = OTHER; note = 2'-O-methylguanosine-3'-phosphate
  modified_base 6: mod_base = OTHER; note = 2'-O-methyluridine-3'-phosphate
  modified_base 7: mod_base = OTHER; note = 2'-deoxy-2'-fluoroadenosine-3'-phosphate
  modified_base 8: mod_base = OTHER; note = 2'-O-methyluridine-3'-phosphate
  modified_base 9: mod_base = OTHER; note = 2'-deoxy-2'-fluorocytidine-3'-phosphate
  modified_base 10: mod_base = OTHER; note = 2'-deoxy-2'-fluorouridine-3'-phosphate
  modified_base 11: mod_base = OTHER; note = 2'-deoxy-2'-fluorocytidine-3'-phosphate
  modified_base 12: mod_base = OTHER; note = 2'-O-methyladenosine-3'-phosphate
  modified_base 13: mod_base = OTHER; note = 2'-O-methylguanosine-3'-phosphate
  modified_base 14: mod_base = OTHER; note = 2'-O-methyladenosine-3'-phosphate
  modified_base 15: mod_base = OTHER; note = 2'-O-methyladenosine-3'-phosphate
  modified_base 16: mod_base = OTHER; note = 2'-O-methyladenosine-3'-phosphate
  modified_base 17: mod_base = OTHER; note = 2'-O-methylguanosine-3'-phosphate
  modified_base 18: mod_base = OTHER; note = 2'-O-methyluridine-3'-phosphate
  modified_base 19: mod_base = OTHER; note = 2'-O-methylguanosine-3'-phosphate
  modified_base 20: mod_base = OTHER; note = 2'-O-methylcytidine-3'-phosphate
  modified_base 21: mod_base = OTHER; note = 2'-O-methyladenosine-3'-phosphate ((2S,4R)-1-[29-[[2-(acetylamino)-2-deoxy-beta-D-galactopyra nosyl]oxy]-14,14-bis[[3-[[3-[[5-[[2-(acetylamino)-2-deoxy-b eta-D-galactopyranosyl]oxy]-1-oxopentyl]amino]propyl]amino] -3-oxopropoxy]methyl]-1,12,19,25-tetraoxo-16-oxa-13,20,24-t riazanonacos-1-yl]-4-hydroxy-2-pyrrolidinyl)methyl ester
gctggtatctcagaaagtgca

SEQ ID NO: 1904 - RNA, 21 nt, synthetic construct
  source 1..21: mol_type = other RNA
  modified_base 1: mod_base = OTHER; note = 2'-O-methyluridine-3'-phosphorothioate
  modified_base 2: mod_base = OTHER; note = 2'-O-methylguanosine-3'-phosphorothioate
  modified_base 3: mod_base = OTHER; note = 2'-O-methylguanosine-3'-phosphate
  modified_base 4: mod_base = OTHER; note = 2'-O-methyluridine-3'-phosphate
  modified_base 5: mod_base = OTHER; note = 2'-O-methyladenosine-3'-phosphate
  modified_base 6: mod_base = OTHER; note = 2'-O-methyluridine-3'-phosphate
  modified_base 7: mod_base = OTHER; note = 2'-deoxy-2'-fluorocytidine-3'-phosphate
  modified_base 8: mod_base = OTHER; note = 2'-O-methyluridine-3'-phosphate
  modified_base 9: mod_base = OTHER; note = 2'-deoxy-2'-fluorocytidine-3'-phosphate
  modified_base 10: mod_base = OTHER; note = 2'-deoxy-2'-fluoroadenosine-3'-phosphate
  modified_base 11: mod_base = OTHER; note = 2'-deoxy-2'-fluoroguanosine-3'-phosphate
  modified_base 12: mod_base = OTHER; note = 2'-O-methyladenosine-3'-phosphate
  modified_base 13: mod_base = OTHER; note = 2'-O-methyladenosine-3'-phosphate
  modified_base 14: mod_base = OTHER; note = 2'-O-methyladenosine-3'-phosphate
  modified_base 15: mod_base = OTHER; note = 2'-O-methylguanosine-3'-phosphate
  modified_base 16: mod_base = OTHER; note = 2'-O-methyluridine-3'-phosphate
  modified_base 17: mod_base = OTHER; note = 2'-O-methylguanosine-3'-phosphate
  modified_base 18: mod_base = OTHER; note = 2'-O-methylcytidine-3'-phosphate
  modified_base 19: mod_base = OTHER; note = 2'-O-methylcytidine-3'-phosphate
  modified_base 20: mod_base = OTHER; note = 2'-O-methyluridine-3'-phosphate
  modified_base 21: mod_base = OTHER; note = 2'-O-methyladenosine-3'-phosphate ((2S,4R)-1-[29-[[2-(acetylamino)-2-deoxy-beta-D-galactopyra nosyl]oxy]-14,14-bis[[3-[[3-[[5-[[2-(acetylamino)-2-deoxy-b eta-D-galactopyranosyl]oxy]-1-oxopentyl]amino]propyl]amino] -3-oxopropoxy]methyl]-1,12,19,25-tetraoxo-16-oxa-13,20,24-t riazanonacos-1-yl]-4-hydroxy-2-pyrrolidinyl)methyl ester
tggtatctcagaaagtgccta

SEQ ID NO: 1905 - RNA, 21 nt, synthetic construct
  source 1..21: mol_type = other RNA
  modified_base 1: mod_base = OTHER; note = 2'-O-methylcytidine-3'-phosphorothioate
  modified_base 2: mod_base = OTHER; note = 2'-O-methyluridine-3'-phosphorothioate
  modified_base 3: mod_base = OTHER; note = 2'-O-methylguanosine-3'-phosphate
  modified_base 4: mod_base = OTHER; note = 2'-O-methyladenosine-3'-phosphate
  modified_base 5: mod_base = OTHER; note = 2'-O-methylcytidine-3'-phosphate
  modified_base 6: mod_base = OTHER; note = 2'-O-methyladenosine-3'-phosphate
  modified_base 7: mod_base = OTHER; note = 2'-deoxy-2'-fluorocytidine-3'-phosphate
  modified_base 8: mod_base = OTHER; note = 2'-O-methyladenosine-3'-phosphate
  modified_base 9: mod_base = OTHER; note = 2'-deoxy-2'-fluorocytidine-3'-phosphate
  modified_base 10: mod_base = OTHER; note = 2'-deoxy-2'-fluorouridine-3'-phosphate
  modified_base 11: mod_base = OTHER; note = 2'-deoxy-2'-fluoroadenosine-3'-phosphate
  modified_base 12: mod_base = OTHER; note = 2'-O-methyladenosine-3'-phosphate
  modified_base 13: mod_base = OTHER; note = 2'-O-methylcytidine-3'-phosphate
  modified_base 14: mod_base = OTHER; note = 2'-O-methylcytidine-3'-phosphate
  modified_base 15: mod_base = OTHER; note = 2'-O-methyladenosine-3'-phosphate
  modified_base 16: mod_base = OTHER; note = 2'-O-methyladenosine-3'-phosphate
  modified_base 17: mod_base = OTHER; note = 2'-O-methylguanosine-3'-phosphate
  modified_base 18: mod_base = OTHER; note = 2'-O-methylcytidine-3'-phosphate
  modified_base 19: mod_base = OTHER; note = 2'-O-methyluridine-3'-phosphate
  modified_base 20: mod_base = OTHER; note = 2'-O-methylguanosine-3'-phosphate
  modified_base 21: mod_base = OTHER; note = 2'-O-methyladenosine-3'-phosphate ((2S,4R)-1-[29-[[2-(acetylamino)-2-deoxy-beta-D-galactopyra nosyl]oxy]-14,14-bis[[3-[[3-[[5-[[2-(acetylamino)-2-deoxy-b eta-D-galactopyranosyl]oxy]-1-oxopentyl]amino]propyl]amino] -3-oxopropoxy]methyl]-1,12,19,25-tetraoxo-16-oxa-13,20,24-t riazanonacos-1-yl]-4-hydroxy-2-pyrrolidinyl)methyl ester
ctgacacactaaccaagctga

SEQ ID NO: 1906 - RNA, 21 nt, synthetic construct
  source 1..21: mol_type = other RNA
  modified_base 1: mod_base = OTHER; note = 2'-O-methyladenosine-3'-phosphorothioate
  modified_base 2: mod_base = OTHER; note = 2'-O-methyladenosine-3'-phosphorothioate
  modified_base 3: mod_base = OTHER; note = 2'-O-methylcytidine-3'-phosphate
  modified_base 4: mod_base = OTHER; note = 2'-O-methylcytidine-3'-phosphate
  modified_base 5: mod_base = OTHER; note = 2'-O-methyladenosine-3'-phosphate
  modified_base 6: mod_base = OTHER; note = 2'-O-methyladenosine-3'-phosphate
  modified_base 7: mod_base = OTHER; note = 2'-deoxy-2'-fluoroguanosine-3'-phosphate
  modified_base 8: mod_base = OTHER; note = 2'-O-methylcytidine-3'-phosphate
  modified_base 9: mod_base = OTHER; note = 2'-deoxy-2'-fluorouridine-3'-phosphate
  modified_base 10: mod_base = OTHER; note = 2'-deoxy-2'-fluoroguanosine-3'-phosphate
  modified_base 11: mod_base = OTHER; note = 2'-deoxy-2'-fluoroadenosine-3'-phosphate
  modified_base 12: mod_base = OTHER; note = 2'-O-methylguanosine-3'-phosphate
  modified_base 13: mod_base = OTHER; note = 2'-O-methyluridine-3'-phosphate
  modified_base 14: mod_base = OTHER; note = 2'-O-methyluridine-3'-phosphate
  modified_base 15: mod_base = OTHER; note = 2'-O-methyluridine-3'-phosphate
  modified_base 16: mod_base = OTHER; note = 2'-O-methylcytidine-3'-phosphate
  modified_base 17: mod_base = OTHER; note = 2'-O-methylcytidine-3'-phosphate
  modified_base 18: mod_base = OTHER; note = 2'-O-methyluridine-3'-phosphate
  modified_base 19: mod_base = OTHER; note = 2'-O-methyladenosine-3'-phosphate
  modified_base 20: mod_base = OTHER; note = 2'-O-methyluridine-3'-phosphate
  modified_base 21: mod_base = OTHER; note = 2'-O-methyladenosine-3'-phosphate ((2S,4R)-1-[29-[[2-(acetylamino)-2-deoxy-beta-D-galactopyra nosyl]oxy]-14,14-bis[[3-[[3-[[5-[[2-(acetylamino)-2-deoxy-b eta-D-galactopyranosyl]oxy]-1-oxopentyl]amino]propyl]amino] -3-oxopropoxy]methyl]-1,12,19,25-tetraoxo-16-oxa-13,20,24-t riazanonacos-1-yl]-4-hydroxy-2-pyrrolidinyl)methyl ester
aaccaagctgagtttcctata

SEQ ID NO: 1907 - RNA, 21 nt, synthetic construct
  source 1..21: mol_type = other RNA
  modified_base 1: mod_base = OTHER; note = 2'-O-methylcytidine-3'-phosphorothioate
  modified_base 2: mod_base = OTHER; note = 2'-O-methylcytidine-3'-phosphorothioate
  modified_base 3: mod_base = OTHER; note = 2'-O-methyladenosine-3'-phosphate
  modified_base 4: mod_base = OTHER; note = 2'-O-methyladenosine-3'-phosphate
  modified_base 5: mod_base = OTHER; note = 2'-O-methylguanosine-3'-phosphate
  modified_base 6: mod_base = OTHER; note = 2'-O-methylcytidine-3'-phosphate
  modified_base 7: mod_base = OTHER; note = 2'-deoxy-2'-fluorouridine-3'-phosphate
  modified_base 8: mod_base = OTHER; note = 2'-O-methylguanosine-3'-phosphate
  modified_base 9: mod_base = OTHER; note = 2'-deoxy-2'-fluoroadenosine-3'-phosphate
  modified_base 10: mod_base = OTHER; note = 2'-deoxy-2'-fluoroguanosine-3'-phosphate
  modified_base 11: mod_base = OTHER; note = 2'-deoxy-2'-fluorouridine-3'-phosphate
  modified_base 12: mod_base = OTHER; note = 2'-O-methyluridine-3'-phosphate
  modified_base 13: mod_base = OTHER; note = 2'-O-methyluridine-3'-phosphate
  modified_base 14: mod_base = OTHER; note = 2'-O-methylcytidine-3'-phosphate
  modified_base 15: mod_base = OTHER; note = 2'-O-methylcytidine-3'-phosphate
  modified_base 16: mod_base = OTHER; note = 2'-O-methyluridine-3'-phosphate
  modified_base 17: mod_base = OTHER; note = 2'-O-methyladenosine-3'-phosphate
  modified_base 18: mod_base = OTHER; note = 2'-O-methyluridine-3'-phosphate
  modified_base 19: mod_base = OTHER; note = 2'-O-methylguanosine-3'-phosphate
  modified_base 20: mod_base = OTHER; note = 2'-O-methylguanosine-3'-phosphate
  modified_base 21: mod_base = OTHER; note = 2'-O-methyladenosine-3'-phosphate ((2S,4R)-1-[29-[[2-(acetylamino)-2-deoxy-beta-D-galactopyra nosyl]oxy]-14,14-bis[[3-[[3-[[5-[[2-(acetylamino)-2-deoxy-b eta-D-galactopyranosyl]oxy]-1-oxopentyl]amino]propyl]amino] -3-oxopropoxy]methyl]-1,12,19,25-tetraoxo-16-oxa-13,20,24-t riazanonacos-1-yl]-4-hydroxy-2-pyrrolidinyl)methyl ester
ccaagctgagtttcctatgga

SEQ ID NO: 1908 - RNA, 21 nt, synthetic construct
  source 1..21: mol_type = other RNA
  modified_base 1: mod_base = OTHER; note = 2'-O-methylcytidine-3'-phosphorothioate
  modified_base 2: mod_base = OTHER; note = 2'-O-methyladenosine-3'-phosphorothioate
  modified_base 3: mod_base = OTHER; note = 2'-O-methyladenosine-3'-phosphate
  modified_base 4: mod_base = OTHER; note = 2'-O-methylguanosine-3'-phosphate
  modified_base 5: mod_base = OTHER; note = 2'-O-methylcytidine-3'-phosphate
  modified_base 6: mod_base = OTHER; note = 2'-O-methyluridine-3'-phosphate
  modified_base 7: mod_base = OTHER; note = 2'-deoxy-2'-fluoroguanosine-3'-phosphate
  modified_base 8: mod_base = OTHER; note = 2'-O-methyladenosine-3'-phosphate
  modified_base 9: mod_base = OTHER; note = 2'-deoxy-2'-fluoroguanosine-3'-phosphate
  modified_base 10: mod_base = OTHER; note = 2'-deoxy-2'-fluorouridine-3'-phosphate
  modified_base 11: mod_base = OTHER; note = 2'-deoxy-2'-fluorouridine-3'-phosphate
  modified_base 12: mod_base = OTHER; note = 2'-O-methyluridine-3'-phosphate
  modified_base 13: mod_base = OTHER; note = 2'-O-methylcytidine-3'-phosphate
  modified_base 14: mod_base = OTHER; note = 2'-O-methylcytidine-3'-phosphate
  modified_base 15: mod_base = OTHER; note = 2'-O-methyluridine-3'-phosphate
  modified_base 16: mod_base = OTHER; note = 2'-O-methyladenosine-3'-phosphate
  modified_base 17: mod_base = OTHER; note = 2'-O-methyluridine-3'-phosphate
  modified_base 18: mod_base = OTHER; note = 2'-O-methylguanosine-3'-phosphate
  modified_base 19: mod_base = OTHER; note = 2'-O-methylguanosine-3'-phosphate
  modified_base 20: mod_base = OTHER; note = 2'-O-methylguanosine-3'-phosphate
  modified_base 21: mod_base = OTHER; note = 2'-O-methyladenosine-3'-phosphate ((2S,4R)-1-[29-[[2-(acetylamino)-2-deoxy-beta-D-galactopyra nosyl]oxy]-14,14-bis[[3-[[3-[[5-[[2-(acetylamino)-2-deoxy-b eta-D-galactopyranosyl]oxy]-1-oxopentyl]amino]propyl]amino] -3-oxopropoxy]methyl]-1,12,19,25-tetraoxo-16-oxa-13,20,24-t riazanonacos-1-yl]-4-hydroxy-2-pyrrolidinyl)methyl ester
caagctgagtttcctatggga

SEQ ID NO: 1909 - RNA, 21 nt, synthetic construct
  source 1..21: mol_type = other RNA
  modified_base 1: mod_base = OTHER; note = 2'-O-methyladenosine-3'-phosphorothioate
  modified_base 2: mod_base = OTHER; note = 2'-O-methyladenosine-3'-phosphorothioate
  modified_base 3: mod_base = OTHER; note = 2'-O-methylguanosine-3'-phosphate
  modified_base 4: mod_base = OTHER; note = 2'-O-methylcytidine-3'-phosphate
  modified_base 5: mod_base = OTHER; note = 2'-O-methyluridine-3'-phosphate
  modified_base 6: mod_base = OTHER; note = 2'-O-methylguanosine-3'-phosphate
  modified_base 7: mod_base = OTHER; note = 2'-deoxy-2'-fluoroadenosine-3'-phosphate
  modified_base 8: mod_base = OTHER; note = 2'-O-methylguanosine-3'-phosphate
  modified_base 9: mod_base = OTHER; note = 2'-deoxy-2'-fluorouridine-3'-phosphate
  modified_base 10: mod_base = OTHER; note = 2'-deoxy-2'-fluorouridine-3'-phosphate
  modified_base 11: mod_base = OTHER; note = 2'-deoxy-2'-fluorouridine-3'-phosphate
  modified_base 12: mod_base = OTHER; note = 2'-O-methylcytidine-3'-phosphate
  modified_base 13: mod_base = OTHER; note = 2'-O-methylcytidine-3'-phosphate
  modified_base 14: mod_base = OTHER; note = 2'-O-methyluridine-3'-phosphate
  modified_base 15: mod_base = OTHER; note = 2'-O-methyladenosine-3'-phosphate
  modified_base 16: mod_base = OTHER; note = 2'-O-methyluridine-3'-phosphate
  modified_base 17: mod_base = OTHER; note = 2'-O-methylguanosine-3'-phosphate
  modified_base 18: mod_base = OTHER; note = 2'-O-methylguanosine-3'-phosphate
  modified_base 19: mod_base = OTHER; note = 2'-O-methylguanosine-3'-phosphate
  modified_base 20: mod_base = OTHER; note = 2'-O-methyladenosine-3'-phosphate
  modified_base 21: mod_base = OTHER; note = 2'-O-methyladenosine-3'-phosphate ((2S,4R)-1-[29-[[2-(acetylamino)-2-deoxy-beta-D-galactopyra nosyl]oxy]-14,14-bis[[3-[[3-[[5-[[2-(acetylamino)-2-deoxy-b eta-D-galactopyranosyl]oxy]-1-oxopentyl]amino]propyl]amino] -3-oxopropoxy]methyl]-1,12,19,25-tetraoxo-16-oxa-13,20,24-t riazanonacos-1-yl]-4-hydroxy-2-pyrrolidinyl)methyl ester
aagctgagtttcctatgggaa

SEQ ID NO: 1910 - RNA, 21 nt, synthetic construct
  source 1..21: mol_type = other RNA
  modified_base 1: mod_base = OTHER; note = 2'-O-methyladenosine-3'-phosphorothioate
  modified_base 2: mod_base = OTHER; note = 2'-O-methylguanosine-3'-phosphorothioate
  modified_base 3: mod_base = OTHER; note = 2'-O-methylcytidine-3'-phosphate
  modified_base 4: mod_base = OTHER; note = 2'-O-methyluridine-3'-phosphate
  modified_base 5: mod_base = OTHER; note = 2'-O-methylguanosine-3'-phosphate
  modified_base 6: mod_base = OTHER; note = 2'-O-methyladenosine-3'-phosphate
  modified_base 7: mod_base = OTHER; note = 2'-deoxy-2'-fluoroguanosine-3'-phosphate
  modified_base 8: mod_base = OTHER; note = 2'-O-methyluridine-3'-phosphate
  modified_base 9: mod_base = OTHER; note = 2'-deoxy-2'-fluorouridine-3'-phosphate
  modified_base 10: mod_base = OTHER; note = 2'-deoxy-2'-fluorouridine-3'-phosphate
  modified_base 11: mod_base = OTHER; note = 2'-deoxy-2'-fluorocytidine-3'-phosphate
  modified_base 12: mod_base = OTHER; note = 2'-O-methylcytidine-3'-phosphate
  modified_base 13: mod_base = OTHER; note = 2'-O-methyluridine-3'-phosphate
  modified_base 14: mod_base = OTHER; note = 2'-O-methyladenosine-3'-phosphate
  modified_base 15: mod_base = OTHER; note = 2'-O-methyluridine-3'-phosphate
  modified_base 16: mod_base = OTHER; note = 2'-O-methylguanosine-3'-phosphate
  modified_base 17: mod_base = OTHER; note = 2'-O-methylguanosine-3'-phosphate
  modified_base 18: mod_base = OTHER; note = 2'-O-methylguanosine-3'-phosphate
  modified_base 19: mod_base = OTHER; note = 2'-O-methyladenosine-3'-phosphate
  modified_base 20: mod_base = OTHER; note = 2'-O-methyladenosine-3'-phosphate
  modified_base 21: mod_base = OTHER; note = 2'-O-methyladenosine-3'-phosphate ((2S,4R)-1-[29-[[2-(acetylamino)-2-deoxy-beta-D-galactopyra nosyl]oxy]-14,14-bis[[3-[[3-[[5-[[2-(acetylamino)-2-deoxy-b eta-D-galactopyranosyl]oxy]-1-oxopentyl]amino]propyl]amino] -3-oxopropoxy]methyl]-1,12,19,25-tetraoxo-16-oxa-13,20,24-t riazanonacos-1-yl]-4-hydroxy-2-pyrrolidinyl)methyl ester
agctgagtttcctatgggaaa

SEQ ID NO: 1911 - RNA, 21 nt, synthetic construct
  source 1..21: mol_type = other RNA
  modified_base 1: mod_base = OTHER; note = 2'-O-methyluridine-3'-phosphorothioate
  modified_base 2: mod_base = OTHER; note = 2'-O-methyluridine-3'-phosphorothioate
  modified_base 3: mod_base = OTHER; note = 2'-O-methylguanosine-3'-phosphate
  modified_base 4: mod_base = OTHER; note = 2'-O-methyluridine-3'-phosphate
  modified_base 5: mod_base = OTHER; note = 2'-O-methyluridine-3'-phosphate
  modified_base 6: mod_base = OTHER; note = 2'-O-methylcytidine-3'-phosphate
  modified_base 7: mod_base = OTHER; note = 2'-deoxy-2'-fluorouridine-3'-phosphate
  modified_base 8: mod_base = OTHER; note = 2'-O-methylguanosine-3'-phosphate
  modified_base 9: mod_base = OTHER; note = 2'-deoxy-2'-fluoroguanosine-3'-phosphate
  modified_base 10: mod_base = OTHER; note = 2'-deoxy-2'-fluorouridine-3'-phosphate
  modified_base 11: mod_base = OTHER; note = 2'-deoxy-2'-fluorocytidine-3'-phosphate
  modified_base 12: mod_base = OTHER; note = 2'-O-methylcytidine-3'-phosphate
  modified_base 13: mod_base = OTHER; note = 2'-O-methyluridine-3'-phosphate
  modified_base 14: mod_base = OTHER; note = 2'-O-methyluridine-3'-phosphate
  modified_base 15: mod_base = OTHER; note = 2'-O-methyluridine-3'-phosphate
  modified_base 16: mod_base = OTHER; note = 2'-O-methyluridine-3'-phosphate
  modified_base 17: mod_base = OTHER; note = 2'-O-methyluridine-3'-phosphate
  modified_base 18: mod_base = OTHER; note = 2'-O-methylguanosine-3'-phosphate
  modified_base 19: mod_base = OTHER; note = 2'-O-methylguanosine-3'-phosphate
  modified_base 20: mod_base = OTHER; note = 2'-O-methyluridine-3'-phosphate
  modified_base 21: mod_base = OTHER; note = 2'-O-methyladenosine-3'-phosphate ((2S,4R)-1-[29-[[2-(acetylamino)-2-deoxy-beta-D-galactopyra nosyl]oxy]-14,14-bis[[3-[[3-[[5-[[2-(acetylamino)-2-deoxy-b eta-D-galactopyranosyl]oxy]-1-oxopentyl]amino]propyl]amino] -3-oxopropoxy]methyl]-1,12,19,25-tetraoxo-16-oxa-13,20,24-t riazanonacos-1-yl]-4-hydroxy-2-pyrrolidinyl)methyl ester
ttgttctggtcctttttggta

SEQ ID NO: 1912 - RNA, 21 nt, synthetic construct
  source 1..21: mol_type = other RNA
  modified_base 1: mod_base = OTHER; note = 2'-O-methyluridine-3'-phosphorothioate
  modified_base 2: mod_base = OTHER; note = 2'-O-methylguanosine-3'-phosphorothioate
  modified_base 3: mod_base = OTHER; note = 2'-O-methyluridine-3'-phosphate
  modified_base 4: mod_base = OTHER; note = 2'-O-methyluridine-3'-phosphate
  modified_base 5: mod_base = OTHER; note = 2'-O-methylcytidine-3'-phosphate
  modified_base 6: mod_base = OTHER; note = 2'-O-methyluridine-3'-phosphate
  modified_base 7: mod_base = OTHER; note = 2'-deoxy-2'-fluoroguanosine-3'-phosphate
  modified_base 8: mod_base = OTHER; note = 2'-O-methylguanosine-3'-phosphate
  modified_base 9: mod_base = OTHER; note = 2'-deoxy-2'-fluorouridine-3'-phosphate
  modified_base 10: mod_base = OTHER; note = 2'-deoxy-2'-fluorocytidine-3'-phosphate
  modified_base 11: mod_base = OTHER; note = 2'-deoxy-2'-fluorocytidine-3'-phosphate
  modified_base 12: mod_base = OTHER; note = 2'-O-methyluridine-3'-phosphate
  modified_base 13: mod_base = OTHER; note = 2'-O-methyluridine-3'-phosphate
  modified_base 14: mod_base = OTHER; note = 2'-O-methyluridine-3'-phosphate
  modified_base 15: mod_base = OTHER; note = 2'-O-methyluridine-3'-phosphate
  modified_base 16: mod_base = OTHER; note = 2'-O-methyluridine-3'-phosphate
  modified_base 17: mod_base = OTHER; note = 2'-O-methylguanosine-3'-phosphate
  modified_base 18: mod_base = OTHER; note = 2'-O-methylguanosine-3'-phosphate
  modified_base 19: mod_base = OTHER; note = 2'-O-methyluridine-3'-phosphate
  modified_base 20: mod_base = OTHER; note = 2'-O-methylcytidine-3'-phosphate
  modified_base 21: mod_base = OTHER; note = 2'-O-methyladenosine-3'-phosphate ((2S,4R)-1-[29-[[2-(acetylamino)-2-deoxy-beta-D-galactopyra nosyl]oxy]-14,14-bis[[3-[[3-[[5-[[2-(acetylamino)-2-deoxy-b eta-D-galactopyranosyl]oxy]-1-oxopentyl]amino]propyl]amino] -3-oxopropoxy]methyl]-1,12,19,25-tetraoxo-16-oxa-13,20,24-t riazanonacos-1-yl]-4-hydroxy-2-pyrrolidinyl)methyl ester
tgttctggtcctttttggtca

SEQ ID NO: 1913 - RNA, 21 nt, synthetic construct
  source 1..21: mol_type = other RNA
  modified_base 1: mod_base = OTHER; note = 2'-O-methylguanosine-3'-phosphorothioate
  modified_base 2: mod_base = OTHER; note = 2'-O-methyluridine-3'-phosphorothioate
  modified_base 3: mod_base = OTHER; note = 2'-O-methyluridine-3'-phosphate
  modified_base 4: mod_base = OTHER; note = 2'-O-methylcytidine-3'-phosphate
  modified_base 5: mod_base = OTHER; note = 2'-O-methyluridine-3'-phosphate
  modified_base 6: mod_base = OTHER; note = 2'-O-methylguanosine-3'-phosphate
  modified_base 7: mod_base = OTHER; note = 2'-deoxy-2'-fluoroguanosine-3'-phosphate
  modified_base 8: mod_base = OTHER; note = 2'-O-methyluridine-3'-phosphate
  modified_base 9: mod_base = OTHER; note = 2'-deoxy-2'-fluorocytidine-3'-phosphate
  modified_base 10: mod_base = OTHER; note = 2'-deoxy-2'-fluorocytidine-3'-phosphate
  modified_base 11: mod_base = OTHER; note = 2'-deoxy-2'-fluorouridine-3'-phosphate
  modified_base 12: mod_base = OTHER; note = 2'-O-methyluridine-3'-phosphate
  modified_base 13: mod_base = OTHER; note = 2'-O-methyluridine-3'-phosphate
  modified_base 14: mod_base = OTHER; note = 2'-O-methyluridine-3'-phosphate
  modified_base 15: mod_base = OTHER; note = 2'-O-methyluridine-3'-phosphate
  modified_base 16: mod_base = OTHER; note = 2'-O-methylguanosine-3'-phosphate
  modified_base 17: mod_base = OTHER; note = 2'-O-methylguanosine-3'-phosphate
  modified_base 18: mod_base = OTHER; note = 2'-O-methyluridine-3'-phosphate
  modified_base 19: mod_base = OTHER; note = 2'-O-methylcytidine-3'-phosphate
  modified_base 20: mod_base = OTHER; note = 2'-O-methylguanosine-3'-phosphate
  modified_base 21: mod_base = OTHER; note = 2'-O-methyladenosine-3'-phosphate ((2S,4R)-1-[29-[[2-(acetylamino)-2-deoxy-beta-D-galactopyra nosyl]oxy]-14,14-bis[[3-[[3-[[5-[[2-(acetylamino)-2-deoxy-b eta-D-galactopyranosyl]oxy]-1-oxopentyl]amino]propyl]amino] -3-oxopropoxy]methyl]-1,12,19,25-tetraoxo-16-oxa-13,20,24-t riazanonacos-1-yl]-4-hydroxy-2-pyrrolidinyl)methyl ester
gttctggtcctttttggtcga

SEQ ID NO: 1914 - RNA, 21 nt, synthetic construct
  source 1..21: mol_type = other RNA
  modified_base 1: mod_base = OTHER; note = 2'-O-methyluridine-3'-phosphorothioate
  modified_base 2: mod_base = OTHER; note = 2'-O-methyluridine-3'-phosphorothioate
  modified_base 3: mod_base = OTHER; note = 2'-O-methylcytidine-3'-phosphate
  modified_base 4: mod_base = OTHER; note = 2'-O-methyluridine-3'-phosphate
  modified_base 5: mod_base = OTHER; note = 2'-O-methylguanosine-3'-phosphate
  modified_base 6: mod_base = OTHER; note = 2'-O-methylguanosine-3'-phosphate
  modified_base 7: mod_base = OTHER; note = 2'-deoxy-2'-fluorouridine-3'-phosphate
  modified_base 8: mod_base = OTHER; note = 2'-O-methylcytidine-3'-phosphate
  modified_base 9: mod_base = OTHER; note = 2'-deoxy-2'-fluorocytidine-3'-phosphate
  modified_base 10: mod_base = OTHER; note = 2'-deoxy-2'-fluorouridine-3'-phosphate
  modified_base 11: mod_base = OTHER; note = 2'-deoxy-2'-fluorouridine-3'-phosphate
  modified_base 12: mod_base = OTHER; note = 2'-O-methyluridine-3'-phosphate
  modified_base 13: mod_base = OTHER; note = 2'-O-methyluridine-3'-phosphate
  modified_base 14: mod_base = OTHER; note = 2'-O-methyluridine-3'-phosphate
  modified_base 15: mod_base = OTHER; note = 2'-O-methylguanosine-3'-phosphate
  modified_base 16: mod_base = OTHER; note = 2'-O-methylguanosine-3'-phosphate
  modified_base 17: mod_base = OTHER; note = 2'-O-methyluridine-3'-phosphate
  modified_base 18: mod_base = OTHER; note = 2'-O-methylcytidine-3'-phosphate
  modified_base 19: mod_base = OTHER; note = 2'-O-methylguanosine-3'-phosphate
  modified_base 20: mod_base = OTHER; note = 2'-O-methyladenosine-3'-phosphate
  modified_base 21: mod_base = OTHER; note = 2'-O-methyladenosine-3'-phosphate ((2S,4R)-1-[29-[[2-(acetylamino)-2-deoxy-beta-D-galactopyra nosyl]oxy]-14,14-bis[[3-[[3-[[5-[[2-(acetylamino)-2-deoxy-b eta-D-galactopyranosyl]oxy]-1-oxopentyl]amino]propyl]amino] -3-oxopropoxy]methyl]-1,12,19,25-tetraoxo-16-oxa-13,20,24-t riazanonacos-1-yl]-4-hydroxy-2-pyrrolidinyl)methyl ester
ttctggtcctttttggtcgaa

SEQ ID NO: 1915 - RNA, 21 nt, synthetic construct
  source 1..21: mol_type = other RNA
  modified_base 1: mod_base = OTHER; note = 2'-O-methyluridine-3'-phosphorothioate
  modified_base 2: mod_base = OTHER; note = 2'-O-methylcytidine-3'-phosphorothioate
  modified_base 3: mod_base = OTHER; note = 2'-O-methyluridine-3'-phosphate
  modified_base 4: mod_base = OTHER; note = 2'-O-methylguanosine-3'-phosphate
  modified_base 5: mod_base = OTHER; note = 2'-O-methylguanosine-3'-phosphate
  modified_base 6: mod_base = OTHER; note = 2'-O-methyluridine-3'-phosphate
  modified_base 7: mod_base = OTHER; note = 2'-deoxy-2'-fluorocytidine-3'-phosphate
  modified_base 8: mod_base = OTHER; note = 2'-O-methylcytidine-3'-phosphate
  modified_base 9: mod_base = OTHER; note = 2'-deoxy-2'-fluorouridine-3'-phosphate
  modified_base 10: mod_base = OTHER; note = 2'-deoxy-2'-fluorouridine-3'-phosphate
  modified_base 11: mod_base = OTHER; note = 2'-deoxy-2'-fluorouridine-3'-phosphate
  modified_base 12: mod_base = OTHER; note = 2'-O-methyluridine-3'-phosphate
  modified_base 13: mod_base = OTHER; note = 2'-O-methyluridine-3'-phosphate
  modified_base 14: mod_base = OTHER; note = 2'-O-methylguanosine-3'-phosphate
  modified_base 15: mod_base = OTHER; note = 2'-O-methylguanosine-3'-phosphate
  modified_base 16: mod_base = OTHER; note = 2'-O-methyluridine-3'-phosphate
  modified_base 17: mod_base = OTHER; note = 2'-O-methylcytidine-3'-phosphate
  modified_base 18: mod_base = OTHER; note = 2'-O-methylguanosine-3'-phosphate
  modified_base 19: mod_base = OTHER; note = 2'-O-methyladenosine-3'-phosphate
  modified_base 20: mod_base = OTHER; note = 2'-O-methylguanosine-3'-phosphate
  modified_base 21: mod_base = OTHER; note = 2'-O-methyladenosine-3'-phosphate ((2S,4R)-1-[29-[[2-(acetylamino)-2-deoxy-beta-D-galactopyra nosyl]oxy]-14,14-bis[[3-[[3-[[5-[[2-(acetylamino)-2-deoxy-b eta-D-galactopyranosyl]oxy]-1-oxopentyl]amino]propyl]amino] -3-oxopropoxy]methyl]-1,12,19,25-tetraoxo-16-oxa-13,20,24-t riazanonacos-1-yl]-4-hydroxy-2-pyrrolidinyl)methyl ester
tctggtcctttttggtcgaga

SEQ ID NO: 1916 - RNA, 21 nt, synthetic construct
  source 1..21: mol_type = other RNA
  modified_base 1: mod_base = OTHER; note = 2'-O-methylcytidine-3'-phosphorothioate
  modified_base 2: mod_base = OTHER; note = 2'-O-methyluridine-3'-phosphorothioate
  modified_base 3: mod_base = OTHER; note = 2'-O-methylguanosine-3'-phosphate
  modified_base 4: mod_base = OTHER; note = 2'-O-methylguanosine-3'-phosphate
  modified_base 5: mod_base = OTHER; note = 2'-O-methyluridine-3'-phosphate
  modified_base 6: mod_base = OTHER; note = 2'-O-methylcytidine-3'-phosphate
  modified_base 7: mod_base = OTHER; note = 2'-deoxy-2'-fluorocytidine-3'-phosphate
  modified_base 8: mod_base = OTHER; note = 2'-O-methyluridine-3'-phosphate
  modified_base 9: mod_base = OTHER; note = 2'-deoxy-2'-fluorouridine-3'-phosphate
  modified_base 10: mod_base = OTHER; note = 2'-deoxy-2'-fluorouridine-3'-phosphate
  modified_base 11: mod_base = OTHER; note = 2'-deoxy-2'-fluorouridine-3'-phosphate
  modified_base 12: mod_base = OTHER; note = 2'-O-methyluridine-3'-phosphate
  modified_base 13: mod_base = OTHER; note = 2'-O-methylguanosine-3'-phosphate
  modified_base 14: mod_base = OTHER; note = 2'-O-methylguanosine-3'-phosphate
  modified_base 15: mod_base = OTHER; note = 2'-O-methyluridine-3'-phosphate
  modified_base 16: mod_base = OTHER; note = 2'-O-methylcytidine-3'-phosphate
  modified_base 17: mod_base = OTHER; note = 2'-O-methylguanosine-3'-phosphate
  modified_base 18: mod_base = OTHER; note = 2'-O-methyladenosine-3'-phosphate
  modified_base 19: mod_base = OTHER; note = 2'-O-methylguanosine-3'-phosphate
  modified_base 20: mod_base = OTHER; note = 2'-O-methylguanosine-3'-phosphate
  modified_base 21: mod_base = OTHER; note = 2'-O-methyladenosine-3'-phosphate ((2S,4R)-1-[29-[[2-(acetylamino)-2-deoxy-beta-D-galactopyra nosyl]oxy]-14,14-bis[[3-[[3-[[5-[[2-(acetylamino)-2-deoxy-b eta-D-galactopyranosyl]oxy]-1-oxopentyl]amino]propyl]amino] -3-oxopropoxy]methyl]-1,12,19,25-tetraoxo-16-oxa-13,20,24-t riazanonacos-1-yl]-4-hydroxy-2-pyrrolidinyl)methyl ester
ctggtcctttttggtcgagga

SEQ ID NO: 1917 - RNA, 21 nt, synthetic construct
  source 1..21: mol_type = other RNA
  modified_base 1: mod_base = OTHER; note = 2'-O-methylguanosine-3'-phosphorothioate
  modified_base 2: mod_base = OTHER; note = 2'-O-methyladenosine-3'-phosphorothioate
  modified_base 3: mod_base = OTHER; note = 2'-O-methylguanosine-3'-phosphate
  modified_base 4: mod_base = OTHER; note = 2'-O-methylguanosine-3'-phosphate
  modified_base 5: mod_base = OTHER; note = 2'-O-methyladenosine-3'-phosphate
  modified_base 6: mod_base = OTHER; note = 2'-O-methylguanosine-3'-phosphate
  modified_base 7: mod_base = OTHER; note = 2'-deoxy-2'-fluorouridine-3'-phosphate
  modified_base 8: mod_base = OTHER; note = 2'-O-methyladenosine-3'-phosphate
  modified_base 9: mod_base = OTHER; note = 2'-deoxy-2'-fluoroadenosine-3'-phosphate
  modified_base 10: mod_base = OTHER; note = 2'-deoxy-2'-fluorocytidine-3'-phosphate
  modified_base 11: mod_base = OTHER; note = 2'-deoxy-2'-fluoroadenosine-3'-phosphate
  modified_base 12: mod_base = OTHER; note = 2'-O-methyladenosine-3'-phosphate
  modified_base 13: mod_base = OTHER; note = 2'-O-methyluridine-3'-phosphate
  modified_base 14: mod_base = OTHER; note = 2'-O-methyladenosine-3'-phosphate
  modified_base 15: mod_base = OTHER; note = 2'-O-methylcytidine-3'-phosphate
  modified_base 16: mod_base = OTHER; note = 2'-O-methyladenosine-3'-phosphate
  modified_base 17: mod_base = OTHER; note = 2'-O-methyladenosine-3'-phosphate
  modified_base 18: mod_base = OTHER; note = 2'-O-methyladenosine-3'-phosphate
  modified_base 19: mod_base = OTHER; note = 2'-O-methyluridine-3'-phosphate
  modified_base 20: mod_base = OTHER; note = 2'-O-methylguanosine-3'-phosphate
  modified_base 21: mod_base = OTHER; note = 2'-O-methyladenosine-3'-phosphate ((2S,4R)-1-[29-[[2-(acetylamino)-2-deoxy-beta-D-galactopyra nosyl]oxy]-14,14-bis[[3-[[3-[[5-[[2-(acetylamino)-2-deoxy-b eta-D-galactopyranosyl]oxy]-1-oxopentyl]amino]propyl]amino] -3-oxopropoxy]methyl]-1,12,19,25-tetraoxo-16-oxa-13,20,24-t riazanonacos-1-yl]-4-hydroxy-2-pyrrolidinyl)methyl ester
gaggagtaacaatacaaatga

SEQ ID NO: 1918 - RNA, 21 nt, synthetic construct
  source 1..21: mol_type = other RNA
  modified_base 1: mod_base = OTHER; note = 2'-O-methyladenosine-3'-phosphorothioate
  modified_base 2: mod_base = OTHER; note = 2'-O-methyluridine-3'-phosphorothioate
  modified_base 3: mod_base = OTHER; note = 2'-O-methylguanosine-3'-phosphate
  modified_base 4: mod_base = OTHER; note = 2'-O-methylguanosine-3'-phosphate
  modified_base 5: mod_base = OTHER; note = 2'-O-methyluridine-3'-phosphate
  modified_base 6: mod_base = OTHER; note = 2'-O-methylguanosine-3'-phosphate
  modified_base 7: mod_base = OTHER; note = 2'-deoxy-2'-fluorouridine-3'-phosphate
  modified_base 8: mod_base = OTHER; note = 2'-O-methyladenosine-3'-phosphate
  modified_base 9: mod_base = OTHER; note = 2'-deoxy-2'-fluoroguanosine-3'-phosphate
  modified_base 10: mod_base = OTHER; note = 2'-deoxy-2'-fluoroadenosine-3'-phosphate
  modified_base 11: mod_base = OTHER; note = 2'-deoxy-2'-fluoroadenosine-3'-phosphate
  modified_base 12: mod_base = OTHER; note = 2'-O-methylcytidine-3'-phosphate
  modified_base 13: mod_base = OTHER; note = 2'-O-methyladenosine-3'-phosphate
  modified_base 14: mod_base = OTHER; note = 2'-O-methylcytidine-3'-phosphate
  modified_base 15: mod_base = OTHER; note = 2'-O-methyluridine-3'-phosphate
  modified_base 16: mod_base = OTHER; note = 2'-O-methyladenosine-3'-phosphate
  modified_base 17: mod_base = OTHER; note = 2'-O-methyladenosine-3'-phosphate
  modified_base 18: mod_base = OTHER; note = 2'-O-methyluridine-3'-phosphate
  modified_base 19: mod_base = OTHER; note = 2'-O-methyluridine-3'-phosphate
  modified_base 20: mod_base = OTHER; note = 2'-O-methylcytidine-3'-phosphate
  modified_base 21: mod_base = OTHER; note = 2'-O-methyladenosine-3'-phosphate ((2S,4R)-1-[29-[[2-(acetylamino)-2-deoxy-beta-D-galactopyra nosyl]oxy]-14,14-bis[[3-[[3-[[5-[[2-(acetylamino)-2-deoxy-b eta-D-galactopyranosyl]oxy]-1-oxopentyl]amino]propyl]amino] -3-oxopropoxy]methyl]-1,12,19,25-tetraoxo-16-oxa-13,20,24-t riazanonacos-1-yl]-4-hydroxy-2-pyrrolidinyl)methyl ester
atggtgtagaacactaattca

SEQ ID NO: 1919 - RNA, 21 nt, synthetic construct
  source 1..21: mol_type = other RNA
  modified_base 1: mod_base = OTHER; note = 2'-O-methylguanosine-3'-phosphorothioate
  modified_base 2: mod_base = OTHER; note = 2'-O-methylguanosine-3'-phosphorothioate
  modified_base 3: mod_base = OTHER; note = 2'-O-methyluridine-3'-phosphate
  modified_base 4: mod_base = OTHER; note = 2'-O-methylguanosine-3'-phosphate
  modified_base 5: mod_base = OTHER; note = 2'-O-methyluridine-3'-phosphate
  modified_base 6: mod_base = OTHER; note = 2'-O-methyladenosine-3'-phosphate
  modified_base 7: mod_base = OTHER; note = 2'-deoxy-2'-fluoroguanosine-3'-phosphate
  modified_base 8: mod_base = OTHER; note = 2'-O-methyladenosine-3'-phosphate
  modified_base 9: mod_base = OTHER; note = 2'-deoxy-2'-fluoroadenosine-3'-phosphate
  modified_base 10: mod_base = OTHER; note = 2'-deoxy-2'-fluorocytidine-3'-phosphate
  modified_base 11: mod_base = OTHER; note = 2'-deoxy-2'-fluoroadenosine-3'-phosphate
  modified_base 12: mod_base = OTHER; note = 2'-O-methylcytidine-3'-phosphate
  modified_base 13: mod_base = OTHER; note = 2'-O-methyluridine-3'-phosphate
  modified_base 14: mod_base = OTHER; note = 2'-O-methyladenosine-3'-phosphate
  modified_base 15: mod_base = OTHER; note = 2'-O-methyladenosine-3'-phosphate
  modified_base 16: mod_base = OTHER; note = 2'-O-methyluridine-3'-phosphate
  modified_base 17: mod_base = OTHER; note = 2'-O-methyluridine-3'-phosphate
  modified_base 18: mod_base = OTHER; note = 2'-O-methylcytidine-3'-phosphate
  modified_base 19: mod_base = OTHER; note = 2'-O-methyladenosine-3'-phosphate
  modified_base 20: mod_base = OTHER; note = 2'-O-methyluridine-3'-phosphate
  modified_base 21: mod_base = OTHER; note = 2'-O-methyladenosine-3'-phosphate ((2S,4R)-1-[29-[[2-(acetylamino)-2-deoxy-beta-D-galactopyra nosyl]oxy]-14,14-bis[[3-[[3-[[5-[[2-(acetylamino)-2-deoxy-b eta-D-galactopyranosyl]oxy]-1-oxopentyl]amino]propyl]amino] -3-oxopropoxy]methyl]-1,12,19,25-tetraoxo-16-oxa-13,20,24-t riazanonacos-1-yl]-4-hydroxy-2-pyrrolidinyl)methyl ester
ggtgtagaacactaattcata

SEQ ID NO: 1920 - RNA, 21 nt, synthetic construct
  source 1..21: mol_type = other RNA
  modified_base 1: mod_base = OTHER; note = 2'-O-methylguanosine-3'-phosphorothioate
  modified_base 2: mod_base = OTHER; note = 2'-O-methyluridine-3'-phosphorothioate
  modified_base 3: mod_base = OTHER; note = 2'-O-methylguanosine-3'-phosphate
  modified_base 4: mod_base = OTHER; note = 2'-O-methyluridine-3'-phosphate
  modified_base 5: mod_base = OTHER; note = 2'-O-methyladenosine-3'-phosphate
  modified_base 6: mod_base = OTHER; note = 2'-O-methylguanosine-3'-phosphate
  modified_base 7: mod_base = OTHER; note = 2'-deoxy-2'-fluoroadenosine-3'-phosphate
  modified_base 8: mod_base = OTHER; note = 2'-O-methyladenosine-3'-phosphate
  modified_base 9: mod_base = OTHER; note = 2'-deoxy-2'-fluorocytidine-3'-phosphate
  modified_base 10: mod_base = OTHER; note = 2'-deoxy-2'-fluoroadenosine-3'-phosphate
  modified_base 11: mod_base = OTHER; note = 2'-deoxy-2'-fluorocytidine-3'-phosphate
  modified_base 12: mod_base = OTHER; note = 2'-O-methyluridine-3'-phosphate
  modified_base 13: mod_base = OTHER; note = 2'-O-methyladenosine-3'-phosphate
  modified_base 14: mod_base = OTHER; note = 2'-O-methyladenosine-3'-phosphate
  modified_base 15: mod_base = OTHER; note = 2'-O-methyluridine-3'-phosphate
  modified_base 16: mod_base = OTHER; note = 2'-O-methyluridine-3'-phosphate
  modified_base 17: mod_base = OTHER; note = 2'-O-methylcytidine-3'-phosphate
  modified_base 18: mod_base = OTHER; note = 2'-O-methyladenosine-3'-phosphate
  modified_base 19: mod_base = OTHER; note = 2'-O-methyluridine-3'-phosphate
  modified_base 20: mod_base = OTHER; note = 2'-O-methyladenosine-3'-phosphate
  modified_base 21: mod_base = OTHER; note = 2'-O-methyladenosine-3'-phosphate ((2S,4R)-1-[29-[[2-(acetylamino)-2-deoxy-beta-D-galactopyra nosyl]oxy]-14,14-bis[[3-[[3-[[5-[[2-(acetylamino)-2-deoxy-b eta-D-galactopyranosyl]oxy]-1-oxopentyl]amino]propyl]amino] -3-oxopropoxy]methyl]-1,12,19,25-tetraoxo-16-oxa-13,20,24-t riazanonacos-1-yl]-4-hydroxy-2-pyrrolidinyl)methyl ester
gtgtagaacactaattcataa

SEQ ID NO: 1921 - RNA, 21 nt, synthetic construct
  source 1..21: mol_type = other RNA
  modified_base 1: mod_base = OTHER; note = 2'-O-methyluridine-3'-phosphorothioate
  modified_base 2: mod_base = OTHER; note = 2'-O-methyladenosine-3'-phosphorothioate
  modified_base 3: mod_base = OTHER; note = 2'-O-methylguanosine-3'-phosphate
  modified_base 4: mod_base = OTHER; note = 2'-O-methyladenosine-3'-phosphate
  modified_base 5: mod_base = OTHER; note = 2'-O-methyladenosine-3'-phosphate
  modified_base 6: mod_base = OTHER; note = 2'-O-methylcytidine-3'-phosphate
  modified_base 7: mod_base = OTHER; note = 2'-deoxy-2'-fluoroadenosine-3'-phosphate
  modified_base 8: mod_base = OTHER; note = 2'-O-methylcytidine-3'-phosphate
  modified_base 9: mod_base = OTHER; note = 2'-deoxy-2'-fluorouridine-3'-phosphate
  modified_base 10: mod_base = OTHER; note = 2'-deoxy-2'-fluoroadenosine-3'-phosphate
  modified_base 11: mod_base = OTHER; note = 2'-deoxy-2'-fluoroadenosine-3'-phosphate
  modified_base 12: mod_base = OTHER; note = 2'-O-methyluridine-3'-phosphate
  modified_base 13: mod_base = OTHER; note = 2'-O-methyluridine-3'-phosphate
  modified_base 14: mod_base = OTHER; note = 2'-O-methylcytidine-3'-phosphate
  modified_base 15: mod_base = OTHER; note = 2'-O-methyladenosine-3'-phosphate
  modified_base 16: mod_base = OTHER; note = 2'-O-methyluridine-3'-phosphate
  modified_base 17: mod_base = OTHER; note = 2'-O-methyladenosine-3'-phosphate
  modified_base 18: mod_base = OTHER; note = 2'-O-methyladenosine-3'-phosphate
  modified_base 19: mod_base = OTHER; note = 2'-O-methyluridine-3'-phosphate
  modified_base 20: mod_base = OTHER; note = 2'-O-methylcytidine-3'-phosphate
  modified_base 21: mod_base = OTHER; note = 2'-O-methyladenosine-3'-phosphate ((2S,4R)-1-[29-[[2-(acetylamino)-2-deoxy-beta-D-galactopyra nosyl]oxy]-14,14-bis[[3-[[3-[[5-[[2-(acetylamino)-2-deoxy-b eta-D-galactopyranosyl]oxy]-1-oxopentyl]amino]propyl]amino] -3-oxopropoxy]methyl]-1,12,19,25-tetraoxo-16-oxa-13,20,24-t riazanonacos-1-yl]-4-hydroxy-2-pyrrolidinyl)methyl ester
tagaacactaattcataatca

SEQ ID NO: 1922 - RNA, 21 nt, synthetic construct
  source 1..21: mol_type = other RNA
  modified_base 1: mod_base = OTHER; note = 2'-O-methylguanosine-3'-phosphorothioate
  modified_base 2: mod_base = OTHER; note = 2'-O-methyladenosine-3'-phosphorothioate
  modified_base 3: mod_base = OTHER; note = 2'-O-methyladenosine-3'-phosphate
  modified_base 4: mod_base = OTHER; note = 2'-O-methylcytidine-3'-phosphate
  modified_base 5: mod_base = OTHER; note = 2'-O-methyladenosine-3'-phosphate
  modified_base 6: mod_base = OTHER; note = 2'-O-methylcytidine-3'-phosphate
  modified_base 7: mod_base = OTHER; note = 2'-deoxy-2'-fluorouridine-3'-phosphate
  modified_base 8: mod_base = OTHER; note = 2'-O-methyladenosine-3'-phosphate
  modified_base 9: mod_base = OTHER; note = 2'-deoxy-2'-fluoroadenosine-3'-phosphate
  modified_base 10: mod_base = OTHER; note = 2'-deoxy-2'-fluorouridine-3'-phosphate
  modified_base 11: mod_base = OTHER; note = 2'-deoxy-2'-fluorouridine-3'-phosphate
  modified_base 12: mod_base = OTHER; note = 2'-O-methylcytidine-3'-phosphate
  modified_base 13: mod_base = OTHER; note = 2'-O-methyladenosine-3'-phosphate
  modified_base 14: mod_base = OTHER; note = 2'-O-methyluridine-3'-phosphate
  modified_base 15: mod_base = OTHER; note = 2'-O-methyladenosine-3'-phosphate
  modified_base 16: mod_base = OTHER; note = 2'-O-methyladenosine-3'-phosphate
  modified_base 17: mod_base = OTHER; note = 2'-O-methyluridine-3'-phosphate
  modified_base 18: mod_base = OTHER; note = 2'-O-methylcytidine-3'-phosphate
  modified_base 19: mod_base = OTHER; note = 2'-O-methyladenosine-3'-phosphate
  modified_base 20: mod_base = OTHER; note = 2'-O-methylcytidine-3'-phosphate
  modified_base 21: mod_base = OTHER; note = 2'-O-methyladenosine-3'-phosphate ((2S,4R)-1-[29-[[2-(acetylamino)-2-deoxy-beta-D-galactopyra nosyl]oxy]-14,14-bis[[3-[[3-[[5-[[2-(acetylamino)-2-deoxy-b eta-D-galactopyranosyl]oxy]-1-oxopentyl]amino]propyl]amino] -3-oxopropoxy]methyl]-1,12,19,25-tetraoxo-16-oxa-13,20,24-t riazanonacos-1-yl]-4-hydroxy-2-pyrrolidinyl)methyl ester
gaacactaattcataatcaca

SEQ ID NO: 1923 - RNA, 21 nt, synthetic construct
  source 1..21: mol_type = other RNA
  modified_base 1: mod_base = OTHER; note = 2'-O-methyluridine-3'-phosphorothioate
  modified_base 2: mod_base = OTHER; note = 2'-O-methylguanosine-3'-phosphorothioate
  modified_base 3: mod_base = OTHER; note = 2'-O-methylcytidine-3'-phosphate
  modified_base 4: mod_base = OTHER; note = 2'-O-methyluridine-3'-phosphate
  modified_base 5: mod_base = OTHER; note = 2'-O-methyluridine-3'-phosphate
  modified_base 6: mod_base = OTHER; note = 2'-O-methyladenosine-3'-phosphate
  modified_base 7: mod_base = OTHER; note = 2'-deoxy-2'-fluoroadenosine-3'-phosphate
  modified_base 8: mod_base = OTHER; note = 2'-O-methyladenosine-3'-phosphate
  modified_base 9: mod_base = OTHER; note = 2'-deoxy-2'-fluoroadenosine-3'-phosphate
  modified_base 10: mod_base = OTHER; note = 2'-deoxy-2'-fluorouridine-3'-phosphate
  modified_base 11: mod_base = OTHER; note = 2'-deoxy-2'-fluoroadenosine-3'-phosphate
  modified_base 12: mod_base = OTHER; note = 2'-O-methyladenosine-3'-phosphate
  modified_base 13: mod_base = OTHER; note = 2'-O-methylguanosine-3'-phosphate
  modified_base 14: mod_base = OTHER; note = 2'-O-methylcytidine-3'-phosphate
  modified_base 15: mod_base = OTHER; note = 2'-O-methyladenosine-3'-phosphate
  modified_base 16: mod_base = OTHER; note = 2'-O-methylguanosine-3'-phosphate
  modified_base 17: mod_base = OTHER; note = 2'-O-methylguanosine-3'-phosphate
  modified_base 18: mod_base = OTHER; note = 2'-O-methyluridine-3'-phosphate
  modified_base 19: mod_base = OTHER; note = 2'-O-methylguanosine-3'-phosphate
  modified_base 20: mod_base = OTHER; note = 2'-O-methylguanosine-3'-phosphate
  modified_base 21: mod_base = OTHER; note = 2'-O-methyladenosine-3'-phosphate ((2S,4R)-1-[29-[[2-(acetylamino)-2-deoxy-beta-D-galactopyra nosyl]oxy]-14,14-bis[[3-[[3-[[5-[[2-(acetylamino)-2-deoxy-b eta-D-galactopyranosyl]oxy]-1-oxopentyl]amino]propyl]amino] -3-oxopropoxy]methyl]-1,12,19,25-tetraoxo-16-oxa-13,20,24-t riazanonacos-1-yl]-4-hydroxy-2-pyrrolidinyl)methyl ester
tgcttaaaataagcaggtgga

SEQ ID NO: 1924 - RNA, 21 nt, synthetic construct
  source 1..21: mol_type = other RNA
  modified_base 1: mod_base = OTHER; note = 2'-O-methyluridine-3'-phosphorothioate
  modified_base 2: mod_base = OTHER; note = 2'-O-methyladenosine-3'-phosphorothioate
  modified_base 3: mod_base = OTHER; note = 2'-O-methyladenosine-3'-phosphate
  modified_base 4: mod_base = OTHER; note = 2'-O-methylguanosine-3'-phosphate
  modified_base 5: mod_base = OTHER; note = 2'-O-methylcytidine-3'-phosphate
  modified_base 6: mod_base = OTHER; note = 2'-O-methyladenosine-3'-phosphate
  modified_base 7: mod_base = OTHER; note = 2'-deoxy-2'-fluoroguanosine-3'-phosphate
  modified_base 8: mod_base = OTHER; note = 2'-O-methylguanosine-3'-phosphate
  modified_base 9: mod_base = OTHER; note = 2'-deoxy-2'-fluorouridine-3'-phosphate
  modified_base 10: mod_base = OTHER; note = 2'-deoxy-2'-fluoroguanosine-3'-phosphate
  modified_base 11: mod_base = OTHER; note = 2'-deoxy-2'-fluoroguanosine-3'-phosphate
  modified_base 12: mod_base = OTHER; note = 2'-O-methyladenosine-3'-phosphate
  modified_base 13: mod_base = OTHER; note = 2'-O-methyluridine-3'-phosphate
  modified_base 14: mod_base = OTHER; note = 2'-O-methylcytidine-3'-phosphate
  modified_base 15: mod_base = OTHER; note = 2'-O-methyluridine-3'-phosphate
  modified_base 16: mod_base = OTHER; note = 2'-O-methyladenosine-3'-phosphate
  modified_base 17: mod_base = OTHER; note = 2'-O-methyluridine-3'-phosphate
  modified_base 18: mod_base = OTHER; note = 2'-O-methyluridine-3'-phosphate
  modified_base 19: mod_base = OTHER; note = 2'-O-methyluridine-3'-phosphate
  modified_base 20: mod_base = OTHER; note = 2'-O-methylcytidine-3'-phosphate
  modified_base 21: mod_base = OTHER; note = 2'-O-methyladenosine-3'-phosphate ((2S,4R)-1-[29-[[2-(acetylamino)-2-deoxy-beta-D-galactopyra nosyl]oxy]-14,14-bis[[3-[[3-[[5-[[2-(acetylamino)-2-deoxy-b eta-D-galactopyranosyl]oxy]-1-oxopentyl]amino]propyl]amino] -3-oxopropoxy]methyl]-1,12,19,25-tetraoxo-16-oxa-13,20,24-t riazanonacos-1-yl]-4-hydroxy-2-pyrrolidinyl)methyl ester
taagcaggtggatctatttca

SEQ ID NO: 1925 - RNA, 21 nt, synthetic construct
  source 1..21: mol_type = other RNA
  modified_base 1: mod_base = OTHER; note = 2'-O-methyladenosine-3'-phosphorothioate
  modified_base 2: mod_base = OTHER; note = 2'-O-methylguanosine-3'-phosphorothioate
  modified_base 3: mod_base = OTHER; note = 2'-O-methylcytidine-3'-phosphate
  modified_base 4: mod_base = OTHER; note = 2'-O-methyladenosine-3'-phosphate
  modified_base 5: mod_base = OTHER; note = 2'-O-methylguanosine-3'-phosphate
  modified_base 6: mod_base = OTHER; note = 2'-O-methylguanosine-3'-phosphate
  modified_base 7: mod_base = OTHER; note = 2'-deoxy-2'-fluorouridine-3'-phosphate
  modified_base 8: mod_base = OTHER; note = 2'-O-methylguanosine-3'-phosphate
  modified_base 9: mod_base = OTHER; note = 2'-deoxy-2'-fluoroguanosine-3'-phosphate
  modified_base 10: mod_base = OTHER; note = 2'-deoxy-2'-fluoroadenosine-3'-phosphate
  modified_base 11: mod_base = OTHER; note = 2'-deoxy-2'-fluorouridine-3'-phosphate
  modified_base 12: mod_base = OTHER; note = 2'-O-methylcytidine-3'-phosphate
  modified_base 13: mod_base = OTHER; note = 2'-O-methyluridine-3'-phosphate
  modified_base 14: mod_base = OTHER; note = 2'-O-methyladenosine-3'-phosphate
  modified_base 15: mod_base = OTHER; note = 2'-O-methyluridine-3'-phosphate
  modified_base 16: mod_base = OTHER; note = 2'-O-methyluridine-3'-phosphate
  modified_base 17: mod_base = OTHER; note = 2'-O-methyluridine-3'-phosphate
  modified_base 18: mod_base = OTHER; note = 2'-O-methylcytidine-3'-phosphate
  modified_base 19: mod_base = OTHER; note = 2'-O-methyladenosine-3'-phosphate
  modified_base 20: mod_base = OTHER; note = 2'-O-methyluridine-3'-phosphate
  modified_base 21: mod_base = OTHER; note = 2'-O-methyladenosine-3'-phosphate ((2S,4R)-1-[29-[[2-(acetylamino)-2-deoxy-beta-D-galactopyra nosyl]oxy]-14,14-bis[[3-[[3-[[5-[[2-(acetylamino)-2-deoxy-b eta-D-galactopyranosyl]oxy]-1-oxopentyl]amino]propyl]amino] -3-oxopropoxy]methyl]-1,12,19,25-tetraoxo-16-oxa-13,20,24-t riazanonacos-1-yl]-4-hydroxy-2-pyrrolidinyl)methyl ester
agcaggtggatctatttcata

SEQ ID NO: 1926 - RNA, 21 nt, synthetic construct
  source 1..21: mol_type = other RNA
  modified_base 1: mod_base = OTHER; note = 2'-O-methylguanosine-3'-phosphorothioate
  modified_base 2: mod_base = OTHER; note = 2'-O-methylcytidine-3'-phosphorothioate
  modified_base 3: mod_base = OTHER; note = 2'-O-methyladenosine-3'-phosphate
  modified_base 4: mod_base = OTHER; note = 2'-O-methylguanosine-3'-phosphate
  modified_base 5: mod_base = OTHER; note = 2'-O-methylguanosine-3'-phosphate
  modified_base 6: mod_base = OTHER; note = 2'-O-methyluridine-3'-phosphate
  modified_base 7: mod_base = OTHER; note = 2'-deoxy-2'-fluoroguanosine-3'-phosphate
  modified_base 8: mod_base = OTHER; note = 2'-O-methylguanosine-3'-phosphate
  modified_base 9: mod_base = OTHER; note = 2'-deoxy-2'-fluoroadenosine-3'-phosphate
  modified_base 10: mod_base = OTHER; note = 2'-deoxy-2'-fluorouridine-3'-phosphate
  modified_base 11: mod_base = OTHER; note = 2'-deoxy-2'-fluorocytidine-3'-phosphate
  modified_base 12: mod_base = OTHER; note = 2'-O-methyluridine-3'-phosphate
  modified_base 13: mod_base = OTHER; note = 2'-O-methyladenosine-3'-phosphate
  modified_base 14: mod_base = OTHER; note = 2'-O-methyluridine-3'-phosphate
  modified_base 15: mod_base = OTHER; note = 2'-O-methyluridine-3'-phosphate
  modified_base 16: mod_base = OTHER; note = 2'-O-methyluridine-3'-phosphate
  modified_base 17: mod_base = OTHER; note = 2'-O-methylcytidine-3'-phosphate
  modified_base 18: mod_base = OTHER; note = 2'-O-methyladenosine-3'-phosphate
  modified_base 19: mod_base = OTHER; note = 2'-O-methyluridine-3'-phosphate
  modified_base 20: mod_base = OTHER; note = 2'-O-methylguanosine-3'-phosphate
  modified_base 21: mod_base = OTHER; note = 2'-O-methyladenosine-3'-phosphate ((2S,4R)-1-[29-[[2-(acetylamino)-2-deoxy-beta-D-galactopyra nosyl]oxy]-14,14-bis[[3-[[3-[[5-[[2-(acetylamino)-2-deoxy-b eta-D-galactopyranosyl]oxy]-1-oxopentyl]amino]propyl]amino] -3-oxopropoxy]methyl]-1,12,19,25-tetraoxo-16-oxa-13,20,24-t riazanonacos-1-yl]-4-hydroxy-2-pyrrolidinyl)methyl ester
gcaggtggatctatttcatga

SEQ ID NO: 1927 - RNA, 21 nt, synthetic construct
  source 1..21: mol_type = other RNA
  modified_base 1: mod_base = OTHER; note = 2'-O-methylguanosine-3'-phosphorothioate
  modified_base 2: mod_base = OTHER; note = 2'-O-methylguanosine-3'-phosphorothioate
  modified_base 3: mod_base = OTHER; note = 2'-O-methyluridine-3'-phosphate
  modified_base 4: mod_base = OTHER; note = 2'-O-methylguanosine-3'-phosphate
  modified_base 5: mod_base = OTHER; note = 2'-O-methylguanosine-3'-phosphate
  modified_base 6: mod_base = OTHER; note = 2'-O-methyladenosine-3'-phosphate
  modified_base 7: mod_base = OTHER; note = 2'-deoxy-2'-fluorouridine-3'-phosphate
  modified_base 8: mod_base = OTHER; note = 2'-O-methylcytidine-3'-phosphate
  modified_base 9: mod_base = OTHER; note = 2'-deoxy-2'-fluorouridine-3'-phosphate
  modified_base 10: mod_base = OTHER; note = 2'-deoxy-2'-fluoroadenosine-3'-phosphate
  modified_base 11: mod_base = OTHER; note = 2'-deoxy-2'-fluorouridine-3'-phosphate
  modified_base 12: mod_base = OTHER; note = 2'-O-methyluridine-3'-phosphate
  modified_base 13: mod_base = OTHER; note = 2'-O-methyluridine-3'-phosphate
  modified_base 14: mod_base = OTHER; note = 2'-O-methylcytidine-3'-phosphate
  modified_base 15: mod_base = OTHER; note = 2'-O-methyladenosine-3'-phosphate
  modified_base 16: mod_base = OTHER; note = 2'-O-methyluridine-3'-phosphate
  modified_base 17: mod_base = OTHER; note = 2'-O-methylguanosine-3'-phosphate
  modified_base 18: mod_base = OTHER; note = 2'-O-methyluridine-3'-phosphate
  modified_base 19: mod_base = OTHER; note = 2'-O-methyluridine-3'-phosphate
  modified_base 20: mod_base = OTHER; note = 2'-O-methyluridine-3'-phosphate
  modified_base 21: mod_base = OTHER; note = 2'-O-methyladenosine-3'-phosphate ((2S,4R)-1-[29-[[2-(acetylamino)-2-deoxy-beta-D-galactopyra nosyl]oxy]-14,14-bis[[3-[[3-[[5-[[2-(acetylamino)-2-deoxy-b eta-D-galactopyranosyl]oxy]-1-oxopentyl]amino]propyl]amino] -3-oxopropoxy]methyl]-1,12,19,25-tetraoxo-16-oxa-13,20,24-t riazanonacos-1-yl]-4-hydroxy-2-pyrrolidinyl)methyl ester
ggtggatctatttcatgttta

SEQ ID NO: 1928 - RNA, 21 nt, synthetic construct
  source 1..21: mol_type = other RNA
  modified_base 1: mod_base = OTHER; note = 2'-O-methylguanosine-3'-phosphorothioate
  modified_base 2: mod_base = OTHER; note = 2'-O-methyluridine-3'-phosphorothioate
  modified_base 3: mod_base = OTHER; note = 2'-O-methylguanosine-3'-phosphate
  modified_base 4: mod_base = OTHER; note = 2'-O-methylguanosine-3'-phosphate
  modified_base 5: mod_base = OTHER; note = 2'-O-methyladenosine-3'-phosphate
  modified_base 6: mod_base = OTHER; note = 2'-O-methyluridine-3'-phosphate
  modified_base 7: mod_base = OTHER; note = 2'-deoxy-2'-fluorocytidine-3'-phosphate
  modified_base 8: mod_base = OTHER; note = 2'-O-methyluridine-3'-phosphate
  modified_base 9: mod_base = OTHER; note = 2'-deoxy-2'-fluoroadenosine-3'-phosphate
  modified_base 10: mod_base = OTHER; note = 2'-deoxy-2'-fluorouridine-3'-phosphate
  modified_base 11: mod_base = OTHER; note = 2'-deoxy-2'-fluorouridine-3'-phosphate
  modified_base 12: mod_base = OTHER; note = 2'-O-methyluridine-3'-phosphate
  modified_base 13: mod_base = OTHER; note = 2'-O-methylcytidine-3'-phosphate
  modified_base 14: mod_base = OTHER; note = 2'-O-methyladenosine-3'-phosphate
  modified_base 15: mod_base = OTHER; note = 2'-O-methyluridine-3'-phosphate
  modified_base 16: mod_base = OTHER; note = 2'-O-methylguanosine-3'-phosphate
  modified_base 17: mod_base = OTHER; note = 2'-O-methyluridine-3'-phosphate
  modified_base 18: mod_base = OTHER; note = 2'-O-methyluridine-3'-phosphate
  modified_base 19: mod_base = OTHER; note = 2'-O-methyluridine-3'-phosphate
  modified_base 20: mod_base = OTHER; note = 2'-O-methyluridine-3'-phosphate
  modified_base 21: mod_base = OTHER; note = 2'-O-methyladenosine-3'-phosphate ((2S,4R)-1-[29-[[2-(acetylamino)-2-deoxy-beta-D-galactopyra nosyl]oxy]-14,14-bis[[3-[[3-[[5-[[2-(acetylamino)-2-deoxy-b eta-D-galactopyranosyl]oxy]-1-oxopentyl]amino]propyl]amino] -3-oxopropoxy]methyl]-1,12,19,25-tetraoxo-16-oxa-13,20,24-t riazanonacos-1-yl]-4-hydroxy-2-pyrrolidinyl)methyl ester
gtggatctatttcatgtttta

SEQ ID NO: 1929 - RNA, 21 nt, synthetic construct
  source 1..21: mol_type = other RNA
  modified_base 1: mod_base = OTHER; note = 2'-O-methylguanosine-3'-phosphorothioate
  modified_base 2: mod_base = OTHER; note = 2'-O-methylguanosine-3'-phosphorothioate
  modified_base 3: mod_base = OTHER; note = 2'-O-methyladenosine-3'-phosphate
  modified_base 4: mod_base = OTHER; note = 2'-O-methyluridine-3'-phosphate
  modified_base 5: mod_base = OTHER; note = 2'-O-methylcytidine-3'-phosphate
  modified_base 6: mod_base = OTHER; note = 2'-O-methyluridine-3'-phosphate
  modified_base 7: mod_base = OTHER; note = 2'-deoxy-2'-fluoroadenosine-3'-phosphate
  modified_base 8: mod_base = OTHER; note = 2'-O-methyluridine-3'-phosphate
  modified_base 9: mod_base = OTHER; note = 2'-deoxy-2'-fluorouridine-3'-phosphate
  modified_base 10: mod_base = OTHER; note = 2'-deoxy-2'-fluorouridine-3'-phosphate
  modified_base 11: mod_base = OTHER; note = 2'-deoxy-2'-fluorocytidine-3'-phosphate
  modified_base 12: mod_base = OTHER; note = 2'-O-methyladenosine-3'-phosphate
  modified_base 13: mod_base = OTHER; note = 2'-O-methyluridine-3'-phosphate
  modified_base 14: mod_base = OTHER; note = 2'-O-methylguanosine-3'-phosphate
  modified_base 15: mod_base = OTHER; note = 2'-O-methyluridine-3'-phosphate
  modified_base 16: mod_base = OTHER; note = 2'-O-methyluridine-3'-phosphate
  modified_base 17: mod_base = OTHER; note = 2'-O-methyluridine-3'-phosphate
  modified_base 18: mod_base = OTHER; note = 2'-O-methyluridine-3'-phosphate
  modified_base 19: mod_base = OTHER; note = 2'-O-methyluridine-3'-phosphate
  modified_base 20: mod_base = OTHER; note = 2'-O-methylguanosine-3'-phosphate
  modified_base 21: mod_base = OTHER; note = 2'-O-methyladenosine-3'-phosphate ((2S,4R)-1-[29-[[2-(acetylamino)-2-deoxy-beta-D-galactopyra nosyl]oxy]-14,14-bis[[3-[[3-[[5-[[2-(acetylamino)-2-deoxy-b eta-D-galactopyranosyl]oxy]-1-oxopentyl]amino]propyl]amino] -3-oxopropoxy]methyl]-1,12,19,25-tetraoxo-16-oxa-13,20,24-t riazanonacos-1-yl]-4-hydroxy-2-pyrrolidinyl)methyl ester
ggatctatttcatgtttttga

SEQ ID NO: 1930 - RNA, 21 nt, synthetic construct
  source 1..21: mol_type = other RNA
  modified_base 1: mod_base = OTHER; note = 2'-O-methylguanosine-3'-phosphorothioate
  modified_base 2: mod_base = OTHER; note = 2'-O-methylguanosine-3'-phosphorothioate
  modified_base 3: mod_base = OTHER; note = 2'-O-methylguanosine-3'-phosphate
  modified_base 4: mod_base = OTHER; note = 2'-O-methyluridine-3'-phosphate
  modified_base 5: mod_base = OTHER; note = 2'-O-methyladenosine-3'-phosphate
  modified_base 6: mod_base = OTHER; note = 2'-O-methylguanosine-3'-phosphate
  modified_base 7: mod_base = OTHER; note = 2'-deoxy-2'-fluoroguanosine-3'-phosphate
  modified_base 8: mod_base = OTHER; note = 2'-O-methylguanosine-3'-phosphate
  modified_base 9: mod_base = OTHER; note = 2'-deoxy-2'-fluorouridine-3'-phosphate
  modified_base 10: mod_base = OTHER; note = 2'-deoxy-2'-fluoroadenosine-3'-phosphate
  modified_base 11: mod_base = OTHER; note = 2'-deoxy-2'-fluoroadenosine-3'-phosphate
  modified_base 12: mod_base = OTHER; note = 2'-O-methyladenosine-3'-phosphate
  modified_base 13: mod_base = OTHER; note = 2'-O-methyluridine-3'-phosphate
  modified_base 14: mod_base = OTHER; note = 2'-O-methylcytidine-3'-phosphate
  modified_base 15: mod_base = OTHER; note = 2'-O-methyladenosine-3'-phosphate
  modified_base 16: mod_base = OTHER; note = 2'-O-methylguanosine-3'-phosphate
  modified_base 17: mod_base = OTHER; note = 2'-O-methyluridine-3'-phosphate
  modified_base 18: mod_base = OTHER; note = 2'-O-methyladenosine-3'-phosphate
  modified_base 19: mod_base = OTHER; note = 2'-O-methyladenosine-3'-phosphate
  modified_base 20: mod_base = OTHER; note = 2'-O-methylguanosine-3'-phosphate
  modified_base 21: mod_base = OTHER; note = 2'-O-methyladenosine-3'-phosphate ((2S,4R)-1-[29-[[2-(acetylamino)-2-deoxy-beta-D-galactopyra nosyl]oxy]-14,14-bis[[3-[[3-[[5-[[2-(acetylamino)-2-deoxy-b eta-D-galactopyranosyl]oxy]-1-oxopentyl]amino]propyl]amino] -3-oxopropoxy]methyl]-1,12,19,25-tetraoxo-16-oxa-13,20,24-t riazanonacos-1-yl]-4-hydroxy-2-pyrrolidinyl)methyl ester
gggtagggtaaatcagtaaga

SEQ ID NO: 1931 - RNA, 21 nt, synthetic construct
  source 1..21: mol_type = other RNA
  modified_base 1: mod_base = OTHER; note = 2'-O-methylguanosine-3'-phosphorothioate
  modified_base 2: mod_base = OTHER; note = 2'-O-methyluridine-3'-phosphorothioate
  modified_base 3: mod_base = OTHER; note = 2'-O-methyladenosine-3'-phosphate
  modified_base 4: mod_base = OTHER; note = 2'-O-methylguanosine-3'-phosphate
  modified_base 5: mod_base = OTHER; note = 2'-O-methylguanosine-3'-phosphate
  modified_base 6: mod_base = OTHER; note = 2'-O-methylguanosine-3'-phosphate
  modified_base 7: mod_base = OTHER; note = 2'-deoxy-2'-fluorouridine-3'-phosphate
  modified_base 8: mod_base = OTHER; note = 2'-O-methyladenosine-3'-phosphate
  modified_base 9: mod_base = OTHER; note = 2'-deoxy-2'-fluoroadenosine-3'-phosphate
  modified_base 10: mod_base = OTHER; note = 2'-deoxy-2'-fluoroadenosine-3'-phosphate
  modified_base 11: mod_base = OTHER; note = 2'-deoxy-2'-fluorouridine-3'-phosphate
  modified_base 12: mod_base = OTHER; note = 2'-O-methylcytidine-3'-phosphate
  modified_base 13: mod_base = OTHER; note = 2'-O-methyladenosine-3'-phosphate
  modified_base 14: mod_base = OTHER; note = 2'-O-methylguanosine-3'-phosphate
  modified_base 15: mod_base = OTHER; note = 2'-O-methyluridine-3'-phosphate
  modified_base 16: mod_base = OTHER; note = 2'-O-methyladenosine-3'-phosphate
  modified_base 17: mod_base = OTHER; note = 2'-O-methyladenosine-3'-phosphate
  modified_base 18: mod_base = OTHER; note = 2'-O-methylguanosine-3'-phosphate
  modified_base 19: mod_base = OTHER; note = 2'-O-methyladenosine-3'-phosphate
  modified_base 20: mod_base = OTHER; note = 2'-O-methylguanosine-3'-phosphate
  modified_base 21: mod_base = OTHER; note = 2'-O-methyladenosine-3'-phosphate ((2S,4R)-1-[29-[[2-(acetylamino)-2-deoxy-beta-D-galactopyra nosyl]oxy]-14,14-bis[[3-[[3-[[5-[[2-(acetylamino)-2-deoxy-b eta-D-galactopyranosyl]oxy]-1-oxopentyl]amino]propyl]amino] -3-oxopropoxy]methyl]-1,12,19,25-tetraoxo-16-oxa-13,20,24-t riazanonacos-1-yl]-4-hydroxy-2-pyrrolidinyl)methyl ester
gtagggtaaatcagtaagaga

SEQ ID NO: 1932 - RNA, 21 nt, synthetic construct
  source 1..21: mol_type = other RNA
  modified_base 1: mod_base = OTHER; note = 2'-O-methyluridine-3'-phosphorothioate
  modified_base 2: mod_base = OTHER; note = 2'-O-methyladenosine-3'-phosphorothioate
  modified_base 3: mod_base = OTHER; note = 2'-O-methylguanosine-3'-phosphate
  modified_base 4: mod_base = OTHER; note = 2'-O-methylguanosine-3'-phosphate
  modified_base 5: mod_base = OTHER; note = 2'-O-methylguanosine-3'-phosphate
  modified_base 6: mod_base = OTHER; note = 2'-O-methyluridine-3'-phosphate
  modified_base 7: mod_base = OTHER; note = 2'-deoxy-2'-fluoroadenosine-3'-phosphate
  modified_base 8: mod_base = OTHER; note = 2'-O-methyladenosine-3'-phosphate
  modified_base 9: mod_base = OTHER; note = 2'-deoxy-2'-fluoroadenosine-3'-phosphate
  modified_base 10: mod_base = OTHER; note = 2'-deoxy-2'-fluorouridine-3'-phosphate
  modified_base 11: mod_base = OTHER; note = 2'-deoxy-2'-fluorocytidine-3'-phosphate
  modified_base 12: mod_base = OTHER; note = 2'-O-methyladenosine-3'-phosphate
  modified_base 13: mod_base = OTHER; note = 2'-O-methylguanosine-3'-phosphate
  modified_base 14: mod_base = OTHER; note = 2'-O-methyluridine-3'-phosphate
  modified_base 15: mod_base = OTHER; note = 2'-O-methyladenosine-3'-phosphate
  modified_base 16: mod_base = OTHER; note = 2'-O-methyladenosine-3'-phosphate
  modified_base 17: mod_base = OTHER; note = 2'-O-methylguanosine-3'-phosphate
  modified_base 18: mod_base = OTHER; note = 2'-O-methyladenosine-3'-phosphate
  modified_base 19: mod_base = OTHER; note = 2'-O-methylguanosine-3'-phosphate
  modified_base 20: mod_base = OTHER; note = 2'-O-methylguanosine-3'-phosphate
  modified_base 21: mod_base = OTHER; note = 2'-O-methyladenosine-3'-phosphate ((2S,4R)-1-[29-[[2-(acetylamino)-2-deoxy-beta-D-galactopyra nosyl]oxy]-14,14-bis[[3-[[3-[[5-[[2-(acetylamino)-2-deoxy-b eta-D-galactopyranosyl]oxy]-1-oxopentyl]amino]propyl]amino] -3-oxopropoxy]methyl]-1,12,19,25-tetraoxo-16-oxa-13,20,24-t riazanonacos-1-yl]-4-hydroxy-2-pyrrolidinyl)methyl ester
tagggtaaatcagtaagagga

SEQ ID NO: 1933 - RNA, 21 nt, synthetic construct
  source 1..21: mol_type = other RNA
  modified_base 1: mod_base = OTHER; note = 2'-O-methyladenosine-3'-phosphorothioate
  modified_base 2: mod_base = OTHER; note = 2'-O-methylguanosine-3'-phosphorothioate
  modified_base 3: mod_base = OTHER; note = 2'-O-methylguanosine-3'-phosphate
  modified_base 4: mod_base = OTHER; note = 2'-O-methylguanosine-3'-phosphate
  modified_base 5: mod_base = OTHER; note = 2'-O-methyluridine-3'-phosphate
  modified_base 6: mod_base = OTHER; note = 2'-O-methyladenosine-3'-phosphate
  modified_base 7: mod_base = OTHER; note = 2'-deoxy-2'-fluoroadenosine-3'-phosphate
  modified_base 8: mod_base = OTHER; note = 2'-O-methyladenosine-3'-phosphate
  modified_base 9: mod_base = OTHER; note = 2'-deoxy-2'-fluorouridine-3'-phosphate
  modified_base 10: mod_base = OTHER; note = 2'-deoxy-2'-fluorocytidine-3'-phosphate
  modified_base 11: mod_base = OTHER; note = 2'-deoxy-2'-fluoroadenosine-3'-phosphate
  modified_base 12: mod_base = OTHER; note = 2'-O-methylguanosine-3'-phosphate
  modified_base 13: mod_base = OTHER; note = 2'-O-methyluridine-3'-phosphate
  modified_base 14: mod_base = OTHER; note = 2'-O-methyladenosine-3'-phosphate
  modified_base 15: mod_base = OTHER; note = 2'-O-methyladenosine-3'-phosphate
  modified_base 16: mod_base = OTHER; note = 2'-O-methylguanosine-3'-phosphate
  modified_base 17: mod_base = OTHER; note = 2'-O-methyladenosine-3'-phosphate
  modified_base 18: mod_base = OTHER; note = 2'-O-methylguanosine-3'-phosphate
  modified_base 19: mod_base = OTHER; note = 2'-O-methylguanosine-3'-phosphate
  modified_base 20: mod_base = OTHER; note = 2'-O-methyluridine-3'-phosphate
  modified_base 21: mod_base = OTHER; note = 2'-O-methyladenosine-3'-phosphate ((2S,4R)-1-[29-[[2-(acetylamino)-2-deoxy-beta-D-galactopyra nosyl]oxy]-14,14-bis[[3-[[3-[[5-[[2-(acetylamino)-2-deoxy-b eta-D-galactopyranosyl]oxy]-1-oxopentyl]amino]propyl]amino] -3-oxopropoxy]methyl]-1,12,19,25-tetraoxo-16-oxa-13,20,24-t riazanonacos-1-yl]-4-hydroxy-2-pyrrolidinyl)methyl ester
agggtaaatcagtaagaggta

SEQ ID NO: 1934 - RNA, 21 nt, synthetic construct
  source 1..21: mol_type = other RNA
  modified_base 1: mod_base = OTHER; note = 2'-O-methylguanosine-3'-phosphorothioate
  modified_base 2: mod_base = OTHER; note = 2'-O-methylguanosine-3'-phosphorothioate
  modified_base 3: mod_base = OTHER; note = 2'-O-methyluridine-3'-phosphate
  modified_base 4: mod_base = OTHER; note = 2'-O-methyladenosine-3'-phosphate
  modified_base 5: mod_base = OTHER; note = 2'-O-methyladenosine-3'-phosphate
  modified_base 6: mod_base = OTHER; note = 2'-O-methyladenosine-3'-phosphate
  modified_base 7: mod_base = OTHER; note = 2'-deoxy-2'-fluorouridine-3'-phosphate
  modified_base 8: mod_base = OTHER; note = 2'-O-methylcytidine-3'-phosphate
  modified_base 9: mod_base = OTHER; note = 2'-deoxy-2'-fluoroadenosine-3'-phosphate
  modified_base 10: mod_base = OTHER; note = 2'-deoxy-2'-fluoroguanosine-3'-phosphate
  modified_base 11: mod_base = OTHER; note = 2'-deoxy-2'-fluorouridine-3'-phosphate
  modified_base 12: mod_base = OTHER; note = 2'-O-methyladenosine-3'-phosphate
  modified_base 13: mod_base = OTHER; note = 2'-O-methyladenosine-3'-phosphate
  modified_base 14: mod_base = OTHER; note = 2'-O-methylguanosine-3'-phosphate
  modified_base 15: mod_base = OTHER; note = 2'-O-methyladenosine-3'-phosphate
  modified_base 16: mod_base = OTHER; note = 2'-O-methylguanosine-3'-phosphate
  modified_base 17: mod_base = OTHER; note = 2'-O-methylguanosine-3'-phosphate
  modified_base 18: mod_base = OTHER; note = 2'-O-methyluridine-3'-phosphate
  modified_base 19: mod_base = OTHER; note = 2'-O-methylguanosine-3'-phosphate
  modified_base 20: mod_base = OTHER; note = 2'-O-methyluridine-3'-phosphate
  modified_base 21: mod_base = OTHER; note = 2'-O-methyladenosine-3'-phosphate ((2S,4R)-1-[29-[[2-(acetylamino)-2-deoxy-beta-D-galactopyra nosyl]oxy]-14,14-bis[[3-[[3-[[5-[[2-(acetylamino)-2-deoxy-b eta-D-galactopyranosyl]oxy]-1-oxopentyl]amino]propyl]amino] -3-oxopropoxy]methyl]-1,12,19,25-tetraoxo-16-oxa-13,20,24-t riazanonacos-1-yl]-4-hydroxy-2-pyrrolidinyl)methyl ester
ggtaaatcagtaagaggtgta

SEQ ID NO: 1935 - RNA, 21 nt, synthetic construct
  source 1..21: mol_type = other RNA
  modified_base 1: mod_base = OTHER; note = 2'-O-methylguanosine-3'-phosphorothioate
  modified_base 2: mod_base = OTHER; note = 2'-O-methyluridine-3'-phosphorothioate
  modified_base 3: mod_base = OTHER; note = 2'-O-methyladenosine-3'-phosphate
  modified_base 4: mod_base = OTHER; note = 2'-O-methyladenosine-3'-phosphate
  modified_base 5: mod_base = OTHER; note = 2'-O-methyladenosine-3'-phosphate
  modified_base 6: mod_base = OTHER; note = 2'-O-methyluridine-3'-phosphate
  modified_base 7: mod_base = OTHER; note = 2'-deoxy-2'-fluorocytidine-3'-phosphate
  modified_base 8: mod_base = OTHER; note = 2'-O-methyladenosine-3'-phosphate
  modified_base 9: mod_base = OTHER; note = 2'-deoxy-2'-fluoroguanosine-3'-phosphate
  modified_base 10: mod_base = OTHER; note = 2'-deoxy-2'-fluorouridine-3'-phosphate
  modified_base 11: mod_base = OTHER; note = 2'-deoxy-2'-fluoroadenosine-3'-phosphate
  modified_base 12: mod_base = OTHER; note = 2'-O-methyladenosine-3'-phosphate
  modified_base 13: mod_base = OTHER; note = 2'-O-methylguanosine-3'-phosphate
  modified_base 14: mod_base = OTHER; note = 2'-O-methyladenosine-3'-phosphate
  modified_base 15: mod_base = OTHER; note = 2'-O-methylguanosine-3'-phosphate
  modified_base 16: mod_base = OTHER; note = 2'-O-methylguanosine-3'-phosphate
  modified_base 17: mod_base = OTHER; note = 2'-O-methyluridine-3'-phosphate
  modified_base 18: mod_base = OTHER; note = 2'-O-methylguanosine-3'-phosphate
  modified_base 19: mod_base = OTHER; note = 2'-O-methyluridine-3'-phosphate
  modified_base 20: mod_base = OTHER; note = 2'-O-methyluridine-3'-phosphate
  modified_base 21: mod_base = OTHER; note = 2'-O-methyladenosine-3'-phosphate ((2S,4R)-1-[29-[[2-(acetylamino)-2-deoxy-beta-D-galactopyra nosyl]oxy]-14,14-bis[[3-[[3-[[5-[[2-(acetylamino)-2-deoxy-b eta-D-galactopyranosyl]oxy]-1-oxopentyl]amino]propyl]amino] -3-oxopropoxy]methyl]-1,12,19,25-tetraoxo-16-oxa-13,20,24-t riazanonacos-1-yl]-4-hydroxy-2-pyrrolidinyl)methyl ester
gtaaatcagtaagaggtgtta

SEQ ID NO: 1936 - RNA, 21 nt, synthetic construct
  source 1..21: mol_type = other RNA
  modified_base 1: mod_base = OTHER; note = 2'-O-methyluridine-3'-phosphorothioate
  modified_base 2: mod_base = OTHER; note = 2'-O-methyluridine-3'-phosphorothioate
  modified_base 3: mod_base = OTHER; note = 2'-O-methyladenosine-3'-phosphate
  modified_base 4: mod_base = OTHER; note = 2'-O-methylcytidine-3'-phosphate
  modified_base 5: mod_base = OTHER; note = 2'-O-methylcytidine-3'-phosphate
  modified_base 6: mod_base = OTHER; note = 2'-O-methyladenosine-3'-phosphate
  modified_base 7: mod_base = OTHER; note = 2'-deoxy-2'-fluoroguanosine-3'-phosphate
  modified_base 8: mod_base = OTHER; note = 2'-O-methyluridine-3'-phosphate
  modified_base 9: mod_base = OTHER; note = 2'-deoxy-2'-fluorouridine-3'-phosphate
  modified_base 10: mod_base = OTHER; note = 2'-deoxy-2'-fluoroguanosine-3'-phosphate
  modified_base 11: mod_base = OTHER; note = 2'-deoxy-2'-fluorocytidine-3'-phosphate
  modified_base 12: mod_base = OTHER; note = 2'-O-methylcytidine-3'-phosphate
  modified_base 13: mod_base = OTHER; note = 2'-O-methyluridine-3'-phosphate
  modified_base 14: mod_base = OTHER; note = 2'-O-methyluridine-3'-phosphate
  modified_base 15: mod_base = OTHER; note = 2'-O-methyluridine-3'-phosphate
  modified_base 16: mod_base = OTHER; note = 2'-O-methyluridine-3'-phosphate
  modified_base 17: mod_base = OTHER; note = 2'-O-methyladenosine-3'-phosphate
  modified_base 18: mod_base = OTHER; note = 2'-O-methyluridine-3'-phosphate
  modified_base 19: mod_base = OTHER; note = 2'-O-methylcytidine-3'-phosphate
  modified_base 20: mod_base = OTHER; note = 2'-O-methylcytidine-3'-phosphate
  modified_base 21: mod_base = OTHER; note = 2'-O-methyladenosine-3'-phosphate ((2S,4R)-1-[29-[[2-(acetylamino)-2-deoxy-beta-D-galactopyra nosyl]oxy]-14,14-bis[[3-[[3-[[5-[[2-(acetylamino)-2-deoxy-b eta-D-galactopyranosyl]oxy]-1-oxopentyl]amino]propyl]amino] -3-oxopropoxy]methyl]-1,12,19,25-tetraoxo-16-oxa-13,20,24-t riazanonacos-1-yl]-4-hydroxy-2-pyrrolidinyl)methyl ester
ttaccagttgccttttatcca

SEQ ID NO: 1937 - RNA, 21 nt, synthetic construct
  source 1..21: mol_type = other RNA
  modified_base 1: mod_base = OTHER; note = 2'-O-methyluridine-3'-phosphorothioate
  modified_base 2: mod_base = OTHER; note = 2'-O-methyladenosine-3'-phosphorothioate
  modified_base 3: mod_base = OTHER; note = 2'-O-methylcytidine-3'-phosphate
  modified_base 4: mod_base = OTHER; note = 2'-O-methylcytidine-3'-phosphate
  modified_base 5: mod_base = OTHER; note = 2'-O-methyladenosine-3'-phosphate
  modified_base 6: mod_base = OTHER; note = 2'-O-methylguanosine-3'-phosphate
  modified_base 7: mod_base = OTHER; note = 2'-deoxy-2'-fluorouridine-3'-phosphate
  modified_base 8: mod_base = OTHER; note = 2'-O-methyluridine-3'-phosphate
  modified_base 9: mod_base = OTHER; note = 2'-deoxy-2'-fluoroguanosine-3'-phosphate
  modified_base 10: mod_base = OTHER; note = 2'-deoxy-2'-fluorocytidine-3'-phosphate
  modified_base 11: mod_base = OTHER; note = 2'-deoxy-2'-fluorocytidine-3'-phosphate
  modified_base 12: mod_base = OTHER; note = 2'-O-methyluridine-3'-phosphate
  modified_base 13: mod_base = OTHER; note = 2'-O-methyluridine-3'-phosphate
  modified_base 14: mod_base = OTHER; note = 2'-O-methyluridine-3'-phosphate
  modified_base 15: mod_base = OTHER; note = 2'-O-methyluridine-3'-phosphate
  modified_base 16: mod_base = OTHER; note = 2'-O-methyladenosine-3'-phosphate
  modified_base 17: mod_base = OTHER; note = 2'-O-methyluridine-3'-phosphate
  modified_base 18: mod_base = OTHER; note = 2'-O-methylcytidine-3'-phosphate
  modified_base 19: mod_base = OTHER; note = 2'-O-methylcytidine-3'-phosphate
  modified_base 20: mod_base = OTHER; note = 2'-O-methylcytidine-3'-phosphate
  modified_base 21: mod_base = OTHER; note = 2'-O-methyladenosine-3'-phosphate ((2S,4R)-1-[29-[[2-(acetylamino)-2-deoxy-beta-D-galactopyra nosyl]oxy]-14,14-bis[[3-[[3-[[5-[[2-(acetylamino)-2-deoxy-b eta-D-galactopyranosyl]oxy]-1-oxopentyl]amino]propyl]amino] -3-oxopropoxy]methyl]-1,12,19,25-tetraoxo-16-oxa-13,20,24-t riazanonacos-1-yl]-4-hydroxy-2-pyrrolidinyl)methyl ester
taccagttgccttttatccca

SEQ ID NO: 1938 - RNA, 21 nt, synthetic construct
  source 1..21: mol_type = other RNA
  modified_base 1: mod_base = OTHER; note = 2'-O-methyluridine-3'-phosphorothioate
  modified_base 2: mod_base = OTHER; note = 2'-O-methyladenosine-3'-phosphorothioate
  modified_base 3: mod_base = OTHER; note = 2'-O-methyluridine-3'-phosphate
  modified_base 4: mod_base = OTHER; note = 2'-O-methylcytidine-3'-phosphate
  modified_base 5: mod_base = OTHER; note = 2'-O-methylcytidine-3'-phosphate
  modified_base 6: mod_base = OTHER; note = 2'-O-methylcytidine-3'-phosphate
  modified_base 7: mod_base = OTHER; note = 2'-deoxy-2'-fluoroadenosine-3'-phosphate
  modified_base 8: mod_base = OTHER; note = 2'-O-methyladenosine-3'-phosphate
  modified_base 9: mod_base = OTHER; note = 2'-deoxy-2'-fluoroadenosine-3'-phosphate
  modified_base 10: mod_base = OTHER; note = 2'-deoxy-2'-fluoroguanosine-3'-phosphate
  modified_base 11: mod_base = OTHER; note = 2'-deoxy-2'-fluorouridine-3'-phosphate
  modified_base 12: mod_base = OTHER; note = 2'-O-methyluridine-3'-phosphate
  modified_base 13: mod_base = OTHER; note = 2'-O-methylguanosine-3'-phosphate
  modified_base 14: mod_base = OTHER; note = 2'-O-methyluridine-3'-phosphate
  modified_base 15: mod_base = OTHER; note = 2'-O-methyluridine-3'-phosphate
  modified_base 16: mod_base = OTHER; note = 2'-O-methylguanosine-3'-phosphate
  modified_base 17: mod_base = OTHER; note = 2'-O-methyluridine-3'-phosphate
  modified_base 18: mod_base = OTHER; note = 2'-O-methyladenosine-3'-phosphate
  modified_base 19: mod_base = OTHER; note = 2'-O-methyladenosine-3'-phosphate
  modified_base 20: mod_base = OTHER; note = 2'-O-methylcytidine-3'-phosphate
  modified_base 21: mod_base = OTHER; note = 2'-O-methyladenosine-3'-phosphate ((2S,4R)-1-[29-[[2-(acetylamino)-2-deoxy-beta-D-galactopyra nosyl]oxy]-14,14-bis[[3-[[3-[[5-[[2-(acetylamino)-2-deoxy-b eta-D-galactopyranosyl]oxy]-1-oxopentyl]amino]propyl]amino] -3-oxopropoxy]methyl]-1,12,19,25-tetraoxo-16-oxa-13,20,24-t riazanonacos-1-yl]-4-hydroxy-2-pyrrolidinyl)methyl ester
tatcccaaagttgttgtaaca

SEQ ID NO: 1939 - RNA, 21 nt, synthetic construct
  source 1..21: mol_type = other RNA
  modified_base 1: mod_base = OTHER; note = 2'-O-methylcytidine-3'-phosphorothioate
  modified_base 2: mod_base = OTHER; note = 2'-O-methylcytidine-3'-phosphorothioate
  modified_base 3: mod_base = OTHER; note = 2'-O-methylcytidine-3'-phosphate
  modified_base 4: mod_base = OTHER; note = 2'-O-methyladenosine-3'-phosphate
  modified_base 5: mod_base = OTHER; note = 2'-O-methyladenosine-3'-phosphate
  modified_base 6: mod_base = OTHER; note = 2'-O-methyladenosine-3'-phosphate
  modified_base 7: mod_base = OTHER; note = 2'-deoxy-2'-fluoroguanosine-3'-phosphate
  modified_base 8: mod_base = OTHER; note = 2'-O-methyluridine-3'-phosphate
  modified_base 9: mod_base = OTHER; note = 2'-deoxy-2'-fluorouridine-3'-phosphate
  modified_base 10: mod_base = OTHER; note = 2'-deoxy-2'-fluoroguanosine-3'-phosphate
  modified_base 11: mod_base = OTHER; note = 2'-deoxy-2'-fluorouridine-3'-phosphate
  modified_base 12: mod_base = OTHER; note = 2'-O-methyluridine-3'-phosphate
  modified_base 13: mod_base = OTHER; note = 2'-O-methylguanosine-3'-phosphate
  modified_base 14: mod_base = OTHER; note = 2'-O-methyluridine-3'-phosphate
  modified_base 15: mod_base = OTHER; note = 2'-O-methyladenosine-3'-phosphate
  modified_base 16: mod_base = OTHER; note = 2'-O-methyladenosine-3'-phosphate
  modified_base 17: mod_base = OTHER; note = 2'-O-methylcytidine-3'-phosphate
  modified_base 18: mod_base = OTHER; note = 2'-O-methylcytidine-3'-phosphate
  modified_base 19: mod_base = OTHER; note = 2'-O-methyluridine-3'-phosphate
  modified_base 20: mod_base = OTHER; note = 2'-O-methylguanosine-3'-phosphate
  modified_base 21: mod_base = OTHER; note = 2'-O-methyladenosine-3'-phosphate ((2S,4R)-1-[29-[[2-(acetylamino)-2-deoxy-beta-D-galactopyra nosyl]oxy]-14,14-bis[[3-[[3-[[5-[[2-(acetylamino)-2-deoxy-b eta-D-galactopyranosyl]oxy]-1-oxopentyl]amino]propyl]amino] -3-oxopropoxy]methyl]-1,12,19,25-tetraoxo-16-oxa-13,20,24-t riazanonacos-1-yl]-4-hydroxy-2-pyrrolidinyl)methyl ester
cccaaagttgttgtaacctga

SEQ ID NO: 1940 - RNA, 21 nt, synthetic construct
  source 1..21: mol_type = other RNA
  modified_base 1: mod_base = OTHER; note = 2'-O-methyluridine-3'-phosphorothioate
  modified_base 2: mod_base = OTHER; note = 2'-O-methyladenosine-3'-phosphorothioate
  modified_base 3: mod_base = OTHER; note = 2'-O-methylcytidine-3'-phosphate
  modified_base 4: mod_base = OTHER; note = 2'-O-methyluridine-3'-phosphate
  modified_base 5: mod_base = OTHER; note = 2'-O-methylguanosine-3'-phosphate
  modified_base 6: mod_base = OTHER; note = 2'-O-methyluridine-3'-phosphate
  modified_base 7: mod_base = OTHER; note = 2'-deoxy-2'-fluorouridine-3'-phosphate
  modified_base 8: mod_base = OTHER; note = 2'-O-methylguanosine-3'-phosphate
  modified_base 9: mod_base = OTHER; note = 2'-deoxy-2'-fluoroguanosine-3'-phosphate
  modified_base 10: mod_base = OTHER; note = 2'-deoxy-2'-fluoroadenosine-3'-phosphate
  modified_base 11: mod_base = OTHER; note = 2'-deoxy-2'-fluorouridine-3'-phosphate
  modified_base 12: mod_base = OTHER; note = 2'-O-methyluridine-3'-phosphate
  modified_base 13: mod_base = OTHER; note = 2'-O-methylguanosine-3'-phosphate
  modified_base 14: mod_base = OTHER; note = 2'-O-methyladenosine-3'-phosphate
  modified_base 15: mod_base = OTHER; note = 2'-O-methyluridine-3'-phosphate
  modified_base 16: mod_base = OTHER; note = 2'-O-methyluridine-3'-phosphate
  modified_base 17: mod_base = OTHER; note = 2'-O-methylcytidine-3'-phosphate
  modified_base 18: mod_base = OTHER; note = 2'-O-methylguanosine-3'-phosphate
  modified_base 19: mod_base = OTHER; note = 2'-O-methyladenosine-3'-phosphate
  modified_base 20: mod_base = OTHER; note = 2'-O-methyladenosine-3'-phosphate
  modified_base 21: mod_base = OTHER; note = 2'-O-methyladenosine-3'-phosphate ((2S,4R)-1-[29-[[2-(acetylamino)-2-deoxy-beta-D-galactopyra nosyl]oxy]-14,14-bis[[3-[[3-[[5-[[2-(acetylamino)-2-deoxy-b eta-D-galactopyranosyl]oxy]-1-oxopentyl]amino]propyl]amino] -3-oxopropoxy]methyl]-1,12,19,25-tetraoxo-16-oxa-13,20,24-t riazanonacos-1-yl]-4-hydroxy-2-pyrrolidinyl)methyl ester
tactgttggattgattcgaaa

SEQ ID NO: 1941 - RNA, 23 nt, synthetic construct
  source 1..23: mol_type = other RNA
  modified_base 1: mod_base = OTHER; note = 2'-O-methyluridine-3'-phosphorothioate 5'-(E)-Vinylphosphonate
  modified_base 2: mod_base = OTHER; note = 2'-deoxy-2'-fluoroadenosine-3'-phosphorothioate
  modified_base 3: mod_base = OTHER; note = 2'-O-methylcytidine-3'-phosphate
  modified_base 4: mod_base = OTHER; note = 2'-O-methylcytidine-3'-phosphate
  modified_base 5: mod_base = OTHER; note = 2'-O-methyladenosine-3'-phosphate
  modified_base 6: mod_base = OTHER; note = 2'-deoxy-2'-fluoroguanosine-3'-phosphate
  modified_base 7: mod_base = OTHER; note = 2'-O-methyladenosine-3'-phosphate
  modified_base 8: mod_base = OTHER; note = 2'-deoxy-2'-fluoroadenosine-3'-phosphate
  modified_base 9: mod_base = OTHER; note = 2'-deoxy-2'-fluorouridine-3'-phosphate
  modified_base 10: mod_base = OTHER; note = 2'-O-methylguanosine-3'-phosphate
  modified_base 11: mod_base = OTHER; note = 2'-O-methylguanosine-3'-phosphate
  modified_base 12: mod_base = OTHER; note = 2'-O-methyladenosine-3'-phosphate
  modified_base 13: mod_base = OTHER; note = 2'-O-methyluridine-3'-phosphate
  modified_base 14: mod_base = OTHER; note = 2'-deoxy-2'-fluorouridine-3'-phosphate
  modified_base 15: mod_base = OTHER; note = 2'-O-methylcytidine-3'-phosphate
  modified_base 16: mod_base = OTHER; note = 2'-deoxy-2'-fluorocytidine-3'-phosphate
  modified_base 17: mod_base = OTHER; note = 2'-O-methyladenosine-3'-phosphate
  modified_base 18: mod_base = OTHER; note = 2'-O-methylguanosine-3'-phosphate
  modified_base 19: mod_base = OTHER; note = 2'-O-methyladenosine-3'-phosphate
  modified_base 20: mod_base = OTHER; note = 2'-O-methylguanosine-3'-phosphate
  modified_base 21: mod_base = OTHER; note = 2'-O-methyluridine-3'-phosphorothioate
  modified_base 22: mod_base = OTHER; note = 2'-O-methylcytidine-3'-phosphorothioate
  modified_base 23: mod_base = OTHER; note = 2'-O-methylcytidine
taccagaatggattccagagtcc

SEQ ID NO: 1942 - RNA, 23 nt, synthetic construct
  source 1..23: mol_type = other RNA
  modified_base 1: mod_base = OTHER; note = 2'-O-methyluridine-3'-phosphorothioate 5'-(E)-Vinylphosphonate
  modified_base 2: mod_base = OTHER; note = 2'-deoxy-2'-fluorocytidine-3'-phosphorothioate
  modified_base 3: mod_base = OTHER; note = 2'-O-methyladenosine-3'-phosphate
  modified_base 4: mod_base = OTHER; note = 2'-O-methylcytidine-3'-phosphate
  modified_base 5: mod_base = OTHER; note = 2'-O-methylcytidine-3'-phosphate
  modified_base 6: mod_base = OTHER; note = 2'-deoxy-2'-fluoroadenosine-3'-phosphate
  modified_base 7: mod_base = OTHER; note = 2'-O-methylguanosine-3'-phosphate
  modified_base 8: mod_base = OTHER; note = 2'-deoxy-2'-fluoroadenosine-3'-phosphate
  modified_base 9: mod_base = OTHER; note = 2'-deoxy-2'-fluoroadenosine-3'-phosphate
  modified_base 10: mod_base = OTHER; note = 2'-O-methyluridine-3'-phosphate
  modified_base 11: mod_base = OTHER; note = 2'-O-methylguanosine-3'-phosphate
  modified_base 12: mod_base = OTHER; note = 2'-O-methylguanosine-3'-phosphate
  modified_base 13: mod_base = OTHER; note = 2'-O-methyladenosine-3'-phosphate
  modified_base 14: mod_base = OTHER; note = 2'-deoxy-2'-fluorouridine-3'-phosphate
  modified_base 15: mod_base = OTHER; note = 2'-O-methyluridine-3'-phosphate
  modified_base 16: mod_base = OTHER; note = 2'-deoxy-2'-fluorocytidine-3'-phosphate
  modified_base 17: mod_base = OTHER; note = 2'-O-methylcytidine-3'-phosphate
  modified_base 18: mod_base = OTHER; note = 2'-O-methyladenosine-3'-phosphate
  modified_base 19: mod_base = OTHER; note = 2'-O-methylguanosine-3'-phosphate
  modified_base 20: mod_base = OTHER; note = 2'-O-methyladenosine-3'-phosphate
  modified_base 21: mod_base = OTHER; note = 2'-O-methylguanosine-3'-phosphorothioate
  modified_base 22: mod_base = OTHER; note = 2'-O-methyluridine-3'-phosphorothioate
  modified_base 23: mod_base = OTHER; note = 2'-O-methylcytidine
tcaccagaatggattccagagtc

SEQ ID NO: 1943 - RNA, 23 nt, synthetic construct
  source 1..23: mol_type = other RNA
  modified_base 1: mod_base = OTHER; note = 2'-O-methyluridine-3'-phosphorothioate 5'-(E)-Vinylphosphonate
  modified_base 2: mod_base = OTHER; note = 2'-deoxy-2'-fluoroguanosine-3'-phosphorothioate
  modified_base 3: mod_base = OTHER; note = 2'-O-methylguanosine-3'-phosphate
  modified_base 4: mod_base = OTHER; note = 2'-O-methyladenosine-3'-phosphate
  modified_base 5: mod_base = OTHER; note = 2'-O-methylcytidine-3'-phosphate
  modified_base 6: mod_base = OTHER; note = 2'-deoxy-2'-fluoroadenosine-3'-phosphate
  modified_base 7: mod_base = OTHER; note = 2'-O-methyluridine-3'-phosphate
  modified_base 8: mod_base = OTHER; note = 2'-deoxy-2'-fluorouridine-3'-phosphate
  modified_base 9: mod_base = OTHER; note = 2'-deoxy-2'-fluoroadenosine-3'-phosphate
  modified_base 10: mod_base = OTHER; note = 2'-O-methylguanosine-3'-phosphate
  modified_base 11: mod_base = OTHER; note = 2'-O-methyluridine-3'-phosphate
  modified_base 12: mod_base = OTHER; note = 2'-O-methylguanosine-3'-phosphate
  modified_base 13: mod_base = OTHER; note = 2'-O-methylguanosine-3'-phosphate
  modified_base 14: mod_base = OTHER; note = 2'-deoxy-2'-fluoroguanosine-3'-phosphate
  modified_base 15: mod_base = OTHER; note = 2'-O-methyladenosine-3'-phosphate
  modified_base 16: mod_base = OTHER; note = 2'-deoxy-2'-fluorouridine-3'-phosphate
  modified_base 17: mod_base = OTHER; note = 2'-O-methylguanosine-3'-phosphate
  modified_base 18: mod_base = OTHER; note = 2'-O-methyladenosine-3'-phosphate
  modified_base 19: mod_base = OTHER; note = 2'-O-methylguanosine-3'-phosphate
  modified_base 20: mod_base = OTHER; note = 2'-O-methylcytidine-3'-phosphate
  modified_base 21: mod_base = OTHER; note = 2'-O-methyladenosine-3'-phosphorothioate
  modified_base 22: mod_base = OTHER; note = 2'-O-methylguanosine-3'-phosphorothioate
  modified_base 23: mod_base = OTHER; note = 2'-O-methylcytidine
tggacattagtgggatgagcagc

SEQ ID NO: 1944 - RNA, 23 nt, synthetic construct
  source 1..23: mol_type = other RNA
  modified_base 1: mod_base = OTHER; note = 2'-O-methyluridine-3'-phosphorothioate 5'-(E)-Vinylphosphonate
  modified_base 2: mod_base = OTHER; note = 2'-deoxy-2'-fluorocytidine-3'-phosphorothioate
  modified_base 3: mod_base = OTHER; note = 2'-O-methyluridine-3'-phosphate
  modified_base 4: mod_base = OTHER; note = 2'-O-methylguanosine-3'-phosphate
  modified_base 5: mod_base = OTHER; note = 2'-O-methylguanosine-3'-phosphate
  modified_base 6: mod_base = OTHER; note = 2'-deoxy-2'-fluoroadenosine-3'-phosphate
  modified_base 7: mod_base = OTHER; note = 2'-O-methylcytidine-3'-phosphate
  modified_base 8: mod_base = OTHER; note = 2'-deoxy-2'-fluoroadenosine-3'-phosphate
  modified_base 9: mod_base = OTHER; note = 2'-deoxy-2'-fluorouridine-3'-phosphate
  modified_base 10: mod_base = OTHER; note = 2'-O-methyluridine-3'-phosphate
  modified_base 11: mod_base = OTHER; note = 2'-O-methyladenosine-3'-phosphate
  modified_base 12: mod_base = OTHER; note = 2'-O-methylguanosine-3'-phosphate
  modified_base 13: mod_base = OTHER; note = 2'-O-methyluridine-3'-phosphate
  modified_base 14: mod_base = OTHER; note = 2'-deoxy-2'-fluoroguanosine-3'-phosphate
  modified_base 15: mod_base = OTHER; note = 2'-O-methylguanosine-3'-phosphate
  modified_base 16: mod_base = OTHER; note = 2'-deoxy-2'-fluoroguanosine-3'-phosphate
  modified_base 17: mod_base = OTHER; note = 2'-O-methyladenosine-3'-phosphate
  modified_base 18: mod_base = OTHER; note = 2'-O-methyluridine-3'-phosphate
  modified_base 19: mod_base = OTHER; note = 2'-O-methylguanosine-3'-phosphate
  modified_base 20: mod_base = OTHER; note = 2'-O-methyladenosine-3'-phosphate
  modified_base 21: mod_base = OTHER; note = 2'-O-methylguanosine-3'-phosphorothioate
  modified_base 22: mod_base = OTHER; note = 2'-O-methylcytidine-3'-phosphorothioate
  modified_base 23: mod_base = OTHER; note = 2'-O-methyladenosine
tctggacattagtgggatgagca

SEQ ID NO: 1945 - RNA, 23 nt, synthetic construct
  source 1..23: mol_type = other RNA
  modified_base 1: mod_base = OTHER; note = 2'-O-methyluridine-3'-phosphorothioate 5'-(E)-Vinylphosphonate
  modified_base 2: mod_base = OTHER; note = 2'-deoxy-2'-fluoroadenosine-3'-phosphorothioate
  modified_base 3: mod_base = OTHER; note = 2'-O-methyluridine-3'-phosphate
  modified_base 4: mod_base = OTHER; note = 2'-O-methylcytidine-3'-phosphate
  modified_base 5: mod_base = OTHER; note = 2'-O-methyladenosine-3'-phosphate
  modified_base 6: mod_base = OTHER; note = 2'-deoxy-2'-fluorouridine-3'-phosphate
  modified_base 7: mod_base = OTHER; note = 2'-O-methyluridine-3'-phosphate
  modified_base 8: mod_base = OTHER; note = 2'-deoxy-2'-fluorouridine-3'-phosphate
  modified_base 9: mod_base = OTHER; note = 2'-deoxy-2'-fluoroguanosine-3'-phosphate
  modified_base 10: mod_base = OTHER; note = 2'-O-methyluridine-3'-phosphate
  modified_base 11: mod_base = OTHER; note = 2'-O-methyladenosine-3'-phosphate
  modified_base 12: mod_base = OTHER; note = 2'-O-methyluridine-3'-phosphate
  modified_base 13: mod_base = OTHER; note = 2'-O-methyluridine-3'-phosphate
  modified_base 14: mod_base = OTHER; note = 2'-deoxy-2'-fluorocytidine-3'-phosphate
  modified_base 15: mod_base = OTHER; note = 2'-O-methyluridine-3'-phosphate
  modified_base 16: mod_base = OTHER; note = 2'-deoxy-2'-fluoroguanosine-3'-phosphate
  modified_base 17: mod_base = OTHER; note = 2'-O-methylcytidine-3'-phosphate
  modified_base 18: mod_base = OTHER; note = 2'-O-methyladenosine-3'-phosphate
  modified_base 19: mod_base = OTHER; note = 2'-O-methyluridine-3'-phosphate
  modified_base 20: mod_base = OTHER; note = 2'-O-methylguanosine-3'-phosphate
  modified_base 21: mod_base = OTHER; note = 2'-O-methylguanosine-3'-phosphorothioate
  modified_base 22: mod_base = OTHER; note = 2'-O-methyluridine-3'-phosphorothioate
  modified_base 23: mod_base = OTHER; note = 2'-O-methyladenosine
tatcatttgtattctgcatggta

SEQ ID NO: 1946 - RNA, 23 nt, synthetic construct
  source 1..23: mol_type = other RNA
  modified_base 1: mod_base = OTHER; note = 2'-O-methyluridine-3'-phosphorothioate 5'-(E)-Vinylphosphonate
  modified_base 2: mod_base = OTHER; note = 2'-deoxy-2'-fluorocytidine-3'-phosphorothioate
  modified_base 3: mod_base = OTHER; note = 2'-O-methyladenosine-3'-phosphate
  modified_base 4: mod_base = OTHER; note = 2'-O-methyluridine-3'-phosphate
  modified_base 5: mod_base = OTHER; note = 2'-O-methylcytidine-3'-phosphate
  modified_base 6: mod_base = OTHER; note = 2'-deoxy-2'-fluoroadenosine-3'-phosphate
  modified_base 7: mod_base = OTHER; note = 2'-O-methyluridine-3'-phosphate
  modified_base 8: mod_base = OTHER; note = 2'-deoxy-2'-fluorouridine-3'-phosphate
  modified_base 9: mod_base = OTHER; note = 2'-deoxy-2'-fluorouridine-3'-phosphate
  modified_base 10: mod_base = OTHER; note = 2'-O-methylguanosine-3'-phosphate
  modified_base 11: mod_base = OTHER; note = 2'-O-methyluridine-3'-phosphate
  modified_base 12: mod_base = OTHER; note = 2'-O-methyladenosine-3'-phosphate
  modified_base 13: mod_base = OTHER; note = 2'-O-methyluridine-3'-phosphate
  modified_base 14: mod_base = OTHER; note = 2'-deoxy-2'-fluorouridine-3'-phosphate
  modified_base 15: mod_base = OTHER; note = 2'-O-methylcytidine-3'-phosphate
  modified_base 16: mod_base = OTHER; note = 2'-deoxy-2'-fluorouridine-3'-phosphate
  modified_base 17: mod_base = OTHER; note = 2'-O-methylguanosine-3'-phosphate
  modified_base 18: mod_base = OTHER; note = 2'-O-methylcytidine-3'-phosphate
  modified_base 19: mod_base = OTHER; note = 2'-O-methyladenosine-3'-phosphate
  modified_base 20: mod_base = OTHER; note = 2'-O-methyluridine-3'-phosphate
  modified_base 21: mod_base = OTHER; note = 2'-O-methylguanosine-3'-phosphorothioate
  modified_base 22: mod_base = OTHER; note = 2'-O-methylguanosine-3'-phosphorothioate
  modified_base 23: mod_base = OTHER; note = 2'-O-methyluridine
tcatcatttgtattctgcatggt

SEQ ID NO: 1947 - RNA, 23 nt, synthetic construct
  source 1..23: mol_type = other RNA
  modified_base 1: mod_base = OTHER; note = 2'-O-methyluridine-3'-phosphorothioate 5'-(E)-Vinylphosphonate
  modified_base 2: mod_base = OTHER; note = 2'-deoxy-2'-fluorocytidine-3'-phosphorothioate
  modified_base 3: mod_base = OTHER; note = 2'-O-methyluridine-3'-phosphate
  modified_base 4: mod_base = OTHER; note = 2'-O-methylguanosine-3'-phosphate
  modified_base 5: mod_base = OTHER; note = 2'-O-methylcytidine-3'-phosphate
  modified_base 6: mod_base = OTHER; note = 2'-deoxy-2'-fluorocytidine-3'-phosphate
  modified_base 7: mod_base = OTHER; note = 2'-O-methyladenosine-3'-phosphate
  modified_base 8: mod_base = OTHER; note = 2'-deoxy-2'-fluorouridine-3'-phosphate
  modified_base 9: mod_base = OTHER; note = 2'-deoxy-2'-fluorouridine-3'-phosphate
  modified_base 10: mod_base = OTHER; note = 2'-O-methyluridine-3'-phosphate
  modified_base 11: mod_base = OTHER; note = 2'-O-methyluridine-3'-phosphate
  modified_base 12: mod_base = OTHER; note = 2'-O-methyladenosine-3'-phosphate
  modified_base 13: mod_base = OTHER; note = 2'-O-methylguanosine-3'-phosphate
  modified_base 14: mod_base = OTHER; note = 2'-deoxy-2'-fluorocytidine-3'-phosphate
  modified_base 15: mod_base = OTHER; note = 2'-O-methyluridine-3'-phosphate
  modified_base 16: mod_base = OTHER; note = 2'-deoxy-2'-fluorocytidine-3'-phosphate
  modified_base 17: mod_base = OTHER; note = 2'-O-methylcytidine-3'-phosphate
  modified_base 18: mod_base = OTHER; note = 2'-O-methyluridine-3'-phosphate
  modified_base 19: mod_base = OTHER; note = 2'-O-methyluridine-3'-phosphate
  modified_base 20: mod_base = OTHER; note = 2'-O-methylcytidine-3'-phosphate
  modified_base 21: mod_base = OTHER; note = 2'-O-methyluridine-3'-phosphorothioate
  modified_base 22: mod_base = OTHER; note = 2'-O-methyluridine-3'-phosphorothioate
  modified_base 23: mod_base = OTHER; note = 2'-O-methylguanosine
tctgccattttagctccttcttg

SEQ ID NO: 1948 - RNA, 23 nt, synthetic construct
  source 1..23: mol_type = other RNA
  modified_base 1: mod_base = OTHER; note = 2'-O-methyluridine-3'-phosphorothioate 5'-(E)-Vinylphosphonate
  modified_base 2: mod_base = OTHER; note = 2'-deoxy-2'-fluorocytidine-3'-phosphorothioate
  modified_base 3: mod_base = OTHER; note = 2'-O-methylguanosine-3'-phosphate
  modified_base 4: mod_base = OTHER; note = 2'-O-methylcytidine-3'-phosphate
  modified_base 5: mod_base = OTHER; note = 2'-O-methyladenosine-3'-phosphate
  modified_base 6: mod_base = OTHER; note = 2'-deoxy-2'-fluorocytidine-3'-phosphate
  modified_base 7: mod_base = OTHER; note = 2'-O-methyluridine-3'-phosphate
  modified_base 8: mod_base = OTHER; note = 2'-deoxy-2'-fluoroguanosine-3'-phosphate
  modified_base 9: mod_base = OTHER; note = 2'-deoxy-2'-fluorocytidine-3'-phosphate
  modified_base 10: mod_base = OTHER; note = 2'-O-methylcytidine-3'-phosphate
  modified_base 11: mod_base = OTHER; note = 2'-O-methyladenosine-3'-phosphate
  modified_base 12: mod_base = OTHER; note = 2'-O-methyluridine-3'-phosphate
  modified_base 13: mod_base = OTHER; note = 2'-O-methyluridine-3'-phosphate
  modified_base 14: mod_base = OTHER; note = 2'-deoxy-2'-fluorouridine-3'-phosphate
  modified_base 15: mod_base = OTHER; note = 2'-O-methyluridine-3'-phosphate
  modified_base 16: mod_base = OTHER; note = 2'-deoxy-2'-fluoroadenosine-3'-phosphate
  modified_base 17: mod_base = OTHER; note = 2'-O-methylguanosine-3'-phosphate
  modified_base 18: mod_base = OTHER; note = 2'-O-methylcytidine-3'-phosphate
  modified_base 19: mod_base = OTHER; note = 2'-O-methyluridine-3'-phosphate
  modified_base 20: mod_base = OTHER; note = 2'-O-methylcytidine-3'-phosphate
  modified_base 21: mod_base = OTHER; note = 2'-O-methylcytidine-3'-phosphorothioate
  modified_base 22: mod_base = OTHER; note = 2'-O-methyluridine-3'-phosphorothioate
  modified_base 23: mod_base = OTHER; note = 2'-O-methyluridine
tcgcactgccattttagctcctt

SEQ ID NO: 1949 - RNA, 23 nt, synthetic construct
  source 1..23: mol_type = other RNA
  modified_base 1: mod_base = OTHER; note = 2'-O-methyluridine-3'-phosphorothioate 5'-(E)-Vinylphosphonate
  modified_base 2: mod_base = OTHER; note = 2'-deoxy-2'-fluoroadenosine-3'-phosphorothioate
  modified_base 3: mod_base = OTHER; note = 2'-O-methylguanosine-3'-phosphate
  modified_base 4: mod_base = OTHER; note = 2'-O-methyladenosine-3'-phosphate
  modified_base 5: mod_base = OTHER; note = 2'-O-methylcytidine-3'-phosphate
  modified_base 6: mod_base = OTHER; note = 2'-deoxy-2'-fluorouridine-3'-phosphate
  modified_base 7: mod_base = OTHER; note = 2'-O-methyluridine-3'-phosphate
  modified_base 8: mod_base = OTHER; note = 2'-deoxy-2'-fluoroadenosine-3'-phosphate
  modified_base 9: mod_base = OTHER; note = 2'-deoxy-2'-fluoroadenosine-3'-phosphate
  modified_base 10: mod_base = OTHER; note = 2'-O-methyladenosine-3'-phosphate
  modified_base 11: mod_base = OTHER; note = 2'-O-methylguanosine-3'-phosphate
  modified_base 12: mod_base = OTHER; note = 2'-O-methyladenosine-3'-phosphate
  modified_base 13: mod_base = OTHER; note = 2'-O-methyluridine-3'-phosphate
  modified_base 14: mod_base = OTHER; note = 2'-deoxy-2'-fluoroguanosine-3'-phosphate
  modified_base 15: mod_base = OTHER; note = 2'-O-methylguanosine-3'-phosphate
  modified_base 16: mod_base = OTHER; note = 2'-deoxy-2'-fluorocytidine-3'-phosphate
  modified_base 17: mod_base = OTHER; note = 2'-O-methylcytidine-3'-phosphate
  modified_base 18: mod_base = OTHER; note = 2'-O-methyladenosine-3'-phosphate
  modified_base 19: mod_base = OTHER; note = 2'-O-methylguanosine-3'-phosphate
  modified_base 20: mod_base = OTHER; note = 2'-O-methyluridine-3'-phosphate
  modified_base 21: mod_base = OTHER; note = 2'-O-methyladenosine-3'-phosphorothioate
  modified_base 22: mod_base = OTHER; note = 2'-O-methyladenosine-3'-phosphorothioate
  modified_base 23: mod_base = OTHER; note = 2'-O-methylguanosine
tagacttaaagatggccagtaag

SEQ ID NO: 1950 - RNA, 23 nt, synthetic construct
  source 1..23: mol_type = other RNA
  modified_base 1: mod_base = OTHER; note = 2'-O-methyluridine-3'-phosphorothioate 5'-(E)-Vinylphosphonate
  modified_base 2: mod_base = OTHER; note = 2'-deoxy-2'-fluorocytidine-3'-phosphorothioate
  modified_base 3: mod_base = OTHER; note = 2'-O-methyladenosine-3'-phosphate
  modified_base 4: mod_base = OTHER; note = 2'-O-methylguanosine-3'-phosphate
  modified_base 5: mod_base = OTHER; note = 2'-O-methyladenosine-3'-phosphate
  modified_base 6: mod_base = OTHER; note = 2'-deoxy-2'-fluorocytidine-3'-phosphate
  modified_base 7: mod_base = OTHER; note = 2'-O-methyluridine-3'-phosphate
  modified_base 8: mod_base = OTHER; note = 2'-deoxy-2'-fluorouridine-3'-phosphate
  modified_base 9: mod_base = OTHER; note = 2'-deoxy-2'-fluoroadenosine-3'-phosphate
  modified_base 10: mod_base = OTHER; note = 2'-O-methyladenosine-3'-phosphate
  modified_base 11: mod_base = OTHER; note = 2'-O-methyladenosine-3'-phosphate
  modified_base 12: mod_base = OTHER; note = 2'-O-methylguanosine-3'-phosphate
  modified_base 13: mod_base = OTHER; note = 2'-O-methyladenosine-3'-phosphate
  modified_base 14: mod_base = OTHER; note = 2'-deoxy-2'-fluorouridine-3'-phosphate
  modified_base 15: mod_base = OTHER; note = 2'-O-methylguanosine-3'-phosphate
  modified_base 16: mod_base = OTHER; note = 2'-deoxy-2'-fluoroguanosine-3'-phosphate
  modified_base 17: mod_base = OTHER; note = 2'-O-methylcytidine-3'-phosphate
  modified_base 18: mod_base = OTHER; note = 2'-O-methylcytidine-3'-phosphate
  modified_base 19: mod_base = OTHER; note = 2'-O-methyladenosine-3'-phosphate
  modified_base 20: mod_base = OTHER; note = 2'-O-methylguanosine-3'-phosphate
  modified_base 21: mod_base = OTHER; note = 2'-O-methyluridine-3'-phosphorothioate
  modified_base 22: mod_base = OTHER; note = 2'-O-methyladenosine-3'-phosphorothioate
  modified_base 23: mod_base = OTHER; note = 2'-O-methyladenosine
tcagacttaaagatggccagtaa

SEQ ID NO: 1951 - RNA, 23 nt, synthetic construct
  source 1..23: mol_type = other RNA
  modified_base 1: mod_base = OTHER; note = 2'-O-methyluridine-3'-phosphorothioate 5'-(E)-Vinylphosphonate
  modified_base 2: mod_base = OTHER; note = 2'-deoxy-2'-fluorocytidine-3'-phosphorothioate
  modified_base 3: mod_base = OTHER; note = 2'-O-methylcytidine-3'-phosphate
  modified_base 4: mod_base = OTHER; note = 2'-O-methyladenosine-3'-phosphate
  modified_base 5: mod_base = OTHER; note = 2'-O-methylguanosine-3'-phosphate
  modified_base 6: mod_base = OTHER; note = 2'-deoxy-2'-fluoroadenosine-3'-phosphate
  modified_base 7: mod_base = OTHER; note = 2'-O-methylcytidine-3'-phosphate
  modified_base 8: mod_base = OTHER; note = 2'-deoxy-2'-fluorouridine-3'-phosphate
  modified_base 9: mod_base = OTHER; note = 2'-deoxy-2'-fluorouridine-3'-phosphate
  modified_base 10: mod_base = OTHER; note = 2'-O-methyladenosine-3'-phosphate
  modified_base 11: mod_base = OTHER; note = 2'-O-methyladenosine-3'-phosphate
  modified_base 12: mod_base = OTHER; note = 2'-O-methyladenosine-3'-phosphate
  modified_base 13: mod_base = OTHER; note = 2'-O-methylguanosine-3'-phosphate
  modified_base 14: mod_base = OTHER; note = 2'-deoxy-2'-fluoroadenosine-3'-phosphate
  modified_base 15: mod_base = OTHER; note = 2'-O-methyluridine-3'-phosphate
  modified_base 16: mod_base = OTHER; note = 2'-deoxy-2'-fluoroguanosine-3'-phosphate
  modified_base 17: mod_base = OTHER; note = 2'-O-methylguanosine-3'-phosphate
  modified_base 18: mod_base = OTHER; note = 2'-O-methylcytidine-3'-phosphate
  modified_base 19: mod_base = OTHER; note = 2'-O-methylcytidine-3'-phosphate
  modified_base 20: mod_base = OTHER; note = 2'-O-methyladenosine-3'-phosphate
  modified_base 21: mod_base = OTHER; note = 2'-O-methylguanosine-3'-phosphorothioate
  modified_base 22: mod_base = OTHER; note = 2'-O-methyluridine-3'-phosphorothioate
  modified_base 23: mod_base = OTHER; note = 2'-O-methyladenosine
tccagacttaaagatggccagta

SEQ ID NO: 1952 - RNA, 23 nt, synthetic construct
  source 1..23: mol_type = other RNA
  modified_base 1: mod_base = OTHER; note = 2'-O-methyluridine-3'-phosphorothioate 5'-(E)-Vinylphosphonate
  modified_base 2: mod_base = OTHER; note = 2'-deoxy-2'-fluoroadenosine-3'-phosphorothioate
  modified_base 3: mod_base = OTHER; note = 2'-O-methyladenosine-3'-phosphate
  modified_base 4: mod_base = OTHER; note = 2'-O-methyluridine-3'-phosphate
  modified_base 5: mod_base = OTHER; note = 2'-O-methyluridine-3'-phosphate
  modified_base 6: mod_base = OTHER; note = 2'-deoxy-2'-fluoroadenosine-3'-phosphate
  modified_base 7: mod_base = OTHER; note = 2'-O-methyluridine-3'-phosphate
  modified_base 8: mod_base = OTHER; note = 2'-deoxy-2'-fluorouridine-3'-phosphate
  modified_base 9: mod_base = OTHER; note = 2'-deoxy-2'-fluoroguanosine-3'-phosphate
  modified_base 10: mod_base = OTHER; note = 2'-O-methylcytidine-3'-phosphate
  modified_base 11: mod_base = OTHER; note = 2'-O-methyladenosine-3'-phosphate
  modified_base 12: mod_base = OTHER; note = 2'-O-methyladenosine-3'-phosphate
  modified_base 13: mod_base = OTHER; note = 2'-O-methylguanosine-3'-phosphate
  modified_base 14: mod_base = OTHER; note = 2'-deoxy-2'-fluorouridine-3'-phosphate
  modified_base 15: mod_base = OTHER; note = 2'-O-methylguanosine-3'-phosphate
  modified_base 16: mod_base = OTHER; note = 2'-deoxy-2'-fluoroadenosine-3'-phosphate
  modified_base 17: mod_base = OTHER; note = 2'-O-methylguanosine-3'-phosphate
  modified_base 18: mod_base = OTHER; note = 2'-O-methylguanosine-3'-phosphate
  modified_base 19: mod_base = OTHER; note = 2'-O-methyluridine-3'-phosphate
  modified_base 20: mod_base = OTHER; note = 2'-O-methyluridine-3'-phosphate
  modified_base 21: mod_base = OTHER; note = 2'-O-methyladenosine-3'-phosphorothioate
  modified_base 22: mod_base = OTHER; note = 2'-O-methylguanosine-3'-phosphorothioate
  modified_base 23: mod_base = OTHER; note = 2'-O-methyladenosine
taattattgcaagtgaggttaga

SEQ ID NO: 1953 - RNA, 23 nt, synthetic construct
  source 1..23: mol_type = other RNA
  modified_base 1: mod_base = OTHER; note = 2'-O-methyluridine-3'-phosphorothioate 5'-(E)-Vinylphosphonate
  modified_base 2: mod_base = OTHER; note = 2'-deoxy-2'-fluorouridine-3'-phosphorothioate
  modified_base 3: mod_base = OTHER; note = 2'-O-methyladenosine-3'-phosphate
  modified_base 4: mod_base = OTHER; note = 2'-O-methyladenosine-3'-phosphate
  modified_base 5: mod_base = OTHER; note = 2'-O-methyluridine-3'-phosphate
  modified_base 6: mod_base = OTHER; note = 2'-deoxy-2'-fluorouridine-3'-phosphate
  modified_base 7: mod_base = OTHER; note = 2'-O-methyladenosine-3'-phosphate
  modified_base 8: mod_base = OTHER; note = 2'-deoxy-2'-fluorouridine-3'-phosphate
  modified_base 9: mod_base = OTHER; note = 2'-deoxy-2'-fluorouridine-3'-phosphate
  modified_base 10: mod_base = OTHER; note = 2'-O-methylguanosine-3'-phosphate
  modified_base 11: mod_base = OTHER; note = 2'-O-methylcytidine-3'-phosphate
  modified_base 12: mod_base = OTHER; note = 2'-O-methyladenosine-3'-phosphate
  modified_base 13: mod_base = OTHER; note = 2'-O-methyladenosine-3'-phosphate
  modified_base 14: mod_base = OTHER; note = 2'-deoxy-2'-fluoroguanosine-3'-phosphate
  modified_base 15: mod_base = OTHER; note = 2'-O-methyluridine-3'-phosphate
  modified_base 16: mod_base = OTHER; note = 2'-deoxy-2'-fluoroguanosine-3'-phosphate
  modified_base 17: mod_base = OTHER; note = 2'-O-methyladenosine-3'-phosphate
  modified_base 18: mod_base = OTHER; note = 2'-O-methylguanosine-3'-phosphate
  modified_base 19: mod_base = OTHER; note = 2'-O-methylguanosine-3'-phosphate
  modified_base 20: mod_base = OTHER; note = 2'-O-methyluridine-3'-phosphate
  modified_base 21: mod_base = OTHER; note = 2'-O-methyluridine-3'-phosphorothioate
  modified_base 22: mod_base = OTHER; note = 2'-O-methyladenosine-3'-phosphorothioate
  modified_base 23: mod_base = OTHER; note = 2'-O-methylguanosine
ttaattattgcaagtgaggttag

SEQ ID NO: 1954 - RNA, 23 nt, synthetic construct
  source 1..23: mol_type = other RNA
  modified_base 1: mod_base = OTHER; note = 2'-O-methyluridine-3'-phosphorothioate 5'-(E)-Vinylphosphonate
  modified_base 2: mod_base = OTHER; note = 2'-deoxy-2'-fluorouridine-3'-phosphorothioate
  modified_base 3: mod_base = OTHER; note = 2'-O-methylguanosine-3'-phosphate
  modified_base 4: mod_base = OTHER; note = 2'-O-methyladenosine-3'-phosphate
  modified_base 5: mod_base = OTHER; note = 2'-O-methylcytidine-3'-phosphate
  modified_base 6: mod_base = OTHER; note = 2'-deoxy-2'-fluoroguanosine-3'-phosphate
  modified_base 7: mod_base = OTHER; note = 2'-O-methyladenosine-3'-phosphate
  modified_base 8: mod_base = OTHER; note = 2'-deoxy-2'-fluoroadenosine-3'-phosphate
  modified_base 9: mod_base = OTHER; note = 2'-deoxy-2'-fluoroguanosine-3'-phosphate
  modified_base 10: mod_base = OTHER; note = 2'-O-methyladenosine-3'-phosphate
  modified_base 11: mod_base = OTHER; note = 2'-O-methylguanosine-3'-phosphate
  modified_base 12: mod_base = OTHER; note = 2'-O-methylcytidine-3'-phosphate
  modified_base 13: mod_base = OTHER; note = 2'-O-methyladenosine-3'-phosphate
  modified_base 14: mod_base = OTHER; note = 2'-deoxy-2'-fluorocytidine-3'-phosphate
  modified_base 15: mod_base = OTHER; note = 2'-O-methyladenosine-3'-phosphate
  modified_base 16: mod_base = OTHER; note = 2'-deoxy-2'-fluoroguanosine-3'-phosphate
  modified_base 17: mod_base = OTHER; note = 2'-O-methyladenosine-3'-phosphate
  modified_base 18: mod_base = OTHER; note = 2'-O-methyluridine-3'-phosphate
  modified_base 19: mod_base = OTHER; note = 2'-O-methylguanosine-3'-phosphate
  modified_base 20: mod_base = OTHER; note = 2'-O-methylguanosine-3'-phosphate
  modified_base 21: mod_base = OTHER; note = 2'-O-methylcytidine-3'-phosphorothioate
  modified_base 22: mod_base = OTHER; note = 2'-O-methyladenosine-3'-phosphorothioate
  modified_base 23: mod_base = OTHER; note = 2'-O-methylguanosine
ttgacgaagagcacagatggcag

SEQ ID NO: 1955 - RNA, 23 nt, synthetic construct
  source 1..23: mol_type = other RNA
  modified_base 1: mod_base = OTHER; note = 2'-O-methyluridine-3'-phosphorothioate 5'-(E)-Vinylphosphonate
  modified_base 2: mod_base = OTHER; note = 2'-deoxy-2'-fluoroadenosine-3'-phosphorothioate
  modified_base 3: mod_base = OTHER; note = 2'-O-methyluridine-3'-phosphate
  modified_base 4: mod_base = OTHER; note = 2'-O-methylguanosine-3'-phosphate
  modified_base 5: mod_base = OTHER; note = 2'-O-methyladenosine-3'-phosphate
  modified_base 6: mod_base = OTHER; note = 2'-deoxy-2'-fluorocytidine-3'-phosphate
  modified_base 7: mod_base = OTHER; note = 2'-O-methylguanosine-3'-phosphate
  modified_base 8: mod_base = OTHER; note = 2'-deoxy-2'-fluoroadenosine-3'-phosphate
  modified_base 9: mod_base = OTHER; note = 2'-deoxy-2'-fluoroadenosine-3'-phosphate
  modified_base 10: mod_base = OTHER; note = 2'-O-methylguanosine-3'-phosphate
  modified_base 11: mod_base = OTHER; note = 2'-O-methyladenosine-3'-phosphate
  modified_base 12: mod_base = OTHER; note = 2'-O-methylguanosine-3'-phosphate
  modified_base 13: mod_base = OTHER; note = 2'-O-methylcytidine-3'-phosphate
  modified_base 14: mod_base = OTHER; note = 2'-deoxy-2'-fluoroadenosine-3'-phosphate
  modified_base 15: mod_base = OTHER; note = 2'-O-methylcytidine-3'-phosphate
  modified_base 16: mod_base = OTHER; note = 2'-deoxy-2'-fluoroadenosine-3'-phosphate
  modified_base 17: mod_base = OTHER; note = 2'-O-methylguanosine-3'-phosphate
  modified_base 18: mod_base = OTHER; note = 2'-O-methyladenosine-3'-phosphate
  modified_base 19: mod_base = OTHER; note = 2'-O-methyluridine-3'-phosphate
  modified_base 20: mod_base = OTHER; note = 2'-O-methylguanosine-3'-phosphate
  modified_base 21: mod_base = OTHER; note = 2'-O-methylguanosine-3'-phosphorothioate
  modified_base 22: mod_base = OTHER; note = 2'-O-methylcytidine-3'-phosphorothioate
  modified_base 23: mod_base = OTHER; note = 2'-O-methyladenosine
tatgacgaagagcacagatggca

SEQ ID NO: 1956 - RNA, 23 nt, synthetic construct
  source 1..23: mol_type = other RNA
  modified_base 1: mod_base = OTHER; note = 2'-O-methyluridine-3'-phosphorothioate 5'-(E)-Vinylphosphonate
  modified_base 2: mod_base = OTHER; note = 2'-deoxy-2'-fluoroadenosine-3'-phosphorothioate
  modified_base 3: mod_base = OTHER; note = 2'-O-methylguanosine-3'-phosphate
  modified_base 4: mod_base = OTHER; note = 2'-O-methyladenosine-3'-phosphate
  modified_base 5: mod_base = OTHER; note = 2'-O-methyluridine-3'-phosphate
  modified_base 6: mod_base = OTHER; note = 2'-deoxy-2'-fluoroguanosine-3'-phosphate
  modified_base 7: mod_base = OTHER; note = 2'-O-methyladenosine-3'-phosphate
  modified_base 8: mod_base = OTHER; note = 2'-deoxy-2'-fluorocytidine-3'-phosphate
  modified_base 9: mod_base = OTHER; note = 2'-deoxy-2'-fluoroguanosine-3'-phosphate
  modified_base 10: mod_base = OTHER; note = 2'-O-methyladenosine-3'-phosphate
  modified_base 11: mod_base = OTHER; note = 2'-O-methyladenosine-3'-phosphate
  modified_base 12: mod_base = OTHER; note = 2'-O-methylguanosine-3'-phosphate
  modified_base 13: mod_base = OTHER; note = 2'-O-methyladenosine-3'-phosphate
  modified_base 14: mod_base = OTHER; note = 2'-deoxy-2'-fluoroguanosine-3'-phosphate
  modified_base 15: mod_base = OTHER; note = 2'-O-methylcytidine-3'-phosphate
  modified_base 16: mod_base = OTHER; note = 2'-deoxy-2'-fluoroadenosine-3'-phosphate
  modified_base 17: mod_base = OTHER; note = 2'-O-methylcytidine-3'-phosphate
  modified_base 18: mod_base = OTHER; note = 2'-O-methyladenosine-3'-phosphate
  modified_base 19: mod_base = OTHER; note = 2'-O-methylguanosine-3'-phosphate
  modified_base 20: mod_base = OTHER; note = 2'-O-methyladenosine-3'-phosphate
  modified_base 21: mod_base = OTHER; note = 2'-O-methyluridine-3'-phosphorothioate
  modified_base 22: mod_base = OTHER; note = 2'-O-methylguanosine-3'-phosphorothioate
  modified_base 23: mod_base = OTHER; note = 2'-O-methylguanosine
tagatgacgaagagcacagatgg

SEQ ID NO: 1957 - RNA, 23 nt, synthetic construct
  source 1..23: mol_type = other RNA
  modified_base 1: mod_base = OTHER; note = 2'-O-methyluridine-3'-phosphorothioate 5'-(E)-Vinylphosphonate
  modified_base 2: mod_base = OTHER; note = 2'-deoxy-2'-fluorocytidine-3'-phosphorothioate
  modified_base 3: mod_base = OTHER; note = 2'-O-methyladenosine-3'-phosphate
  modified_base 4: mod_base = OTHER; note = 2'-O-methylguanosine-3'-phosphate
  modified_base 5: mod_base = OTHER; note = 2'-O-methyladenosine-3'-phosphate
  modified_base 6: mod_base = OTHER; note = 2'-deoxy-2'-fluorouridine-3'-phosphate
  modified_base 7: mod_base = OTHER; note = 2'-O-methylguanosine-3'-phosphate
  modified_base 8: mod_base = OTHER; note = 2'-deoxy-2'-fluoroadenosine-3'-phosphate
  modified_base 9: mod_base = OTHER; note = 2'-deoxy-2'-fluorocytidine-3'-phosphate
  modified_base 10: mod_base = OTHER; note = 2'-O-methylguanosine-3'-phosphate
  modified_base 11: mod_base = OTHER; note = 2'-O-methyladenosine-3'-phosphate
  modified_base 12: mod_base = OTHER; note = 2'-O-methyladenosine-3'-phosphate
  modified_base 13: mod_base = OTHER; note = 2'-O-methylguanosine-3'-phosphate
  modified_base 14: mod_base = OTHER; note = 2'-deoxy-2'-fluoroadenosine-3'-phosphate
  modified_base 15: mod_base = OTHER; note = 2'-O-methylguanosine-3'-phosphate
  modified_base 16: mod_base = OTHER; note = 2'-deoxy-2'-fluorocytidine-3'-phosphate
  modified_base 17: mod_base = OTHER; note = 2'-O-methyladenosine-3'-phosphate
  modified_base 18: mod_base = OTHER; note = 2'-O-methylcytidine-3'-phosphate
  modified_base 19: mod_base = OTHER; note = 2'-O-methyladenosine-3'-phosphate
  modified_base 20: mod_base = OTHER; note = 2'-O-methylguanosine-3'-phosphate
  modified_base 21: mod_base = OTHER; note = 2'-O-methyladenosine-3'-phosphorothioate
  modified_base 22: mod_base = OTHER; note = 2'-O-methyluridine-3'-phosphorothioate
  modified_base 23: mod_base = OTHER; note = 2'-O-methylguanosine
tcagatgacgaagagcacagatg

SEQ ID NO: 1958 - RNA, 23 nt, synthetic construct
  source 1..23: mol_type = other RNA
  modified_base 1: mod_base = OTHER; note = 2'-O-methyluridine-3'-phosphorothioate 5'-(E)-Vinylphosphonate
  modified_base 2: mod_base = OTHER; note = 2'-deoxy-2'-fluorouridine-3'-phosphorothioate
  modified_base 3: mod_base = OTHER; note = 2'-O-methylcytidine-3'-phosphate
  modified_base 4: mod_base = OTHER; note = 2'-O-methyladenosine-3'-phosphate
  modified_base 5: mod_base = OTHER; note = 2'-O-methylguanosine-3'-phosphate
  modified_base 6: mod_base = OTHER; note = 2'-deoxy-2'-fluoroadenosine-3'-phosphate
  modified_base 7: mod_base = OTHER; note = 2'-O-methyluridine-3'-phosphate
  modified_base 8: mod_base = OTHER; note = 2'-deoxy-2'-fluoroguanosine-3'-phosphate
  modified_base 9: mod_base = OTHER; note = 2'-deoxy-2'-fluoroadenosine-3'-phosphate
  modified_base 10: mod_base = OTHER; note = 2'-O-methylcytidine-3'-phosphate
  modified_base 11: mod_base = OTHER; note = 2'-O-methylguanosine-3'-phosphate
  modified_base 12: mod_base = OTHER; note = 2'-O-methyladenosine-3'-phosphate
  modified_base 13: mod_base = OTHER; note = 2'-O-methyladenosine-3'-phosphate
  modified_base 14: mod_base = OTHER; note = 2'-deoxy-2'-fluoroguanosine-3'-phosphate
  modified_base 15: mod_base = OTHER; note = 2'-O-methyladenosine-3'-phosphate
  modified_base 16: mod_base = OTHER; note = 2'-deoxy-2'-fluoroguanosine-3'-phosphate
  modified_base 17: mod_base = OTHER; note = 2'-O-methylcytidine-3'-phosphate
  modified_base 18: mod_base = OTHER; note = 2'-O-methyladenosine-3'-phosphate
  modified_base 19: mod_base = OTHER; note = 2'-O-methylcytidine-3'-phosphate
  modified_base 20: mod_base = OTHER; note = 2'-O-methyladenosine-3'-phosphate
  modified_base 21: mod_base = OTHER; note = 2'-O-methylguanosine-3'-phosphorothioate
  modified_base 22: mod_base = OTHER; note = 2'-O-methyladenosine-3'-phosphorothioate
  modified_base 23: mod_base = OTHER; note = 2'-O-methyluridine
ttcagatgacgaagagcacagat

SEQ ID NO: 1959 - RNA, 23 nt, synthetic construct
  source 1..23: mol_type = other RNA
  modified_base 1: mod_base = OTHER; note = 2'-O-methyluridine-3'-phosphorothioate 5'-(E)-Vinylphosphonate
  modified_base 2: mod_base = OTHER; note = 2'-deoxy-2'-fluoroguanosine-3'-phosphorothioate
  modified_base 3: mod_base = OTHER; note = 2'-O-methyluridine-3'-phosphate
  modified_base 4: mod_base = OTHER; note = 2'-O-methylcytidine-3'-phosphate
  modified_base 5: mod_base = OTHER; note = 2'-O-methyladenosine-3'-phosphate
  modified_base 6: mod_base = OTHER; note = 2'-deoxy-2'-fluoroguanosine-3'-phosphate
  modified_base 7: mod_base = OTHER; note = 2'-O-methyladenosine-3'-phosphate
  modified_base 8: mod_base = OTHER; note = 2'-deoxy-2'-fluorouridine-3'-phosphate
  modified_base 9: mod_base = OTHER; note = 2'-deoxy-2'-fluoroguanosine-3'-phosphate
  modified_base 10: mod_base = OTHER; note = 2'-O-methyladenosine-3'-phosphate
  modified_base 11: mod_base = OTHER; note = 2'-O-methylcytidine-3'-phosphate
  modified_base 12: mod_base = OTHER; note = 2'-O-methylguanosine-3'-phosphate
  modified_base 13: mod_base = OTHER; note = 2'-O-methyladenosine-3'-phosphate
  modified_base 14: mod_base = OTHER; note = 2'-deoxy-2'-fluoroadenosine-3'-phosphate
  modified_base 15: mod_base = OTHER; note = 2'-O-methylguanosine-3'-phosphate
  modified_base 16: mod_base = OTHER; note = 2'-deoxy-2'-fluoroadenosine-3'-phosphate
  modified_base 17: mod_base = OTHER; note = 2'-O-methylguanosine-3'-phosphate
  modified_base 18: mod_base = OTHER; note = 2'-O-methylcytidine-3'-phosphate
  modified_base 19: mod_base = OTHER; note = 2'-O-methyladenosine-3'-phosphate
  modified_base 20: mod_base = OTHER; note = 2'-O-methylcytidine-3'-phosphate
  modified_base 21: mod_base = OTHER; note = 2'-O-methyladenosine-3'-phosphorothioate
  modified_base 22: mod_base = OTHER; note = 2'-O-methylguanosine-3'-phosphorothioate
  modified_base 23: mod_base = OTHER; note = 2'-O-methyladenosine
tgtcagatgacgaagagcacaga

SEQ ID NO: 1960 - RNA, 23 nt, synthetic construct
  source 1..23: mol_type = other RNA
  modified_base 1: mod_base = OTHER; note = 2'-O-methyluridine-3'-phosphorothioate 5'-(E)-Vinylphosphonate
  modified_base 2: mod_base = OTHER; note = 2'-deoxy-2'-fluoroguanosine-3'-phosphorothioate
  modified_base 3: mod_base = OTHER; note = 2'-O-methylguanosine-3'-phosphate
  modified_base 4: mod_base = OTHER; note = 2'-O-methyluridine-3'-phosphate
  modified_base 5: mod_base = OTHER; note = 2'-O-methylcytidine-3'-phosphate
  modified_base 6: mod_base = OTHER; note = 2'-deoxy-2'-fluoroadenosine-3'-phosphate
  modified_base 7: mod_base = OTHER; note = 2'-O-methylguanosine-3'-phosphate
  modified_base 8: mod_base = OTHER; note = 2'-deoxy-2'-fluoroadenosine-3'-phosphate
  modified_base 9: mod_base = OTHER; note = 2'-deoxy-2'-fluorouridine-3'-phosphate
  modified_base 10: mod_base = OTHER; note = 2'-O-methylguanosine-3'-phosphate
  modified_base 11: mod_base = OTHER; note = 2'-O-methyladenosine-3'-phosphate
  modified_base 12: mod_base = OTHER; note = 2'-O-methylcytidine-3'-phosphate
  modified_base 13: mod_base = OTHER; note = 2'-O-methylguanosine-3'-phosphate
  modified_base 14: mod_base = OTHER; note = 2'-deoxy-2'-fluoroadenosine-3'-phosphate
  modified_base 15: mod_base = OTHER; note = 2'-O-methyladenosine-3'-phosphate
  modified_base 16: mod_base = OTHER; note = 2'-deoxy-2'-fluoroguanosine-3'-phosphate
  modified_base 17: mod_base = OTHER; note = 2'-O-methyladenosine-3'-phosphate
  modified_base 18: mod_base = OTHER; note = 2'-O-methylguanosine-3'-phosphate
  modified_base 19: mod_base = OTHER; note = 2'-O-methylcytidine-3'-phosphate
  modified_base 20: mod_base = OTHER; note = 2'-O-methyladenosine-3'-phosphate
  modified_base 21: mod_base = OTHER; note = 2'-O-methylcytidine-3'-phosphorothioate
  modified_base 22: mod_base = OTHER; note = 2'-O-methyladenosine-3'-phosphorothioate
  modified_base 23: mod_base = OTHER; note = 2'-O-methylguanosine
tggtcagatgacgaagagcacag

SEQ ID NO: 1961 - RNA, 23 nt, synthetic construct
  source 1..23: mol_type = other RNA
  modified_base 1: mod_base = OTHER; note = 2'-O-methyluridine-3'-phosphorothioate 5'-(E)-Vinylphosphonate
  modified_base 2: mod_base = OTHER; note = 2'-deoxy-2'-fluorouridine-3'-phosphorothioate
  modified_base 3: mod_base = OTHER; note = 2'-O-methyluridine-3'-phosphate
  modified_base 4: mod_base = OTHER; note = 2'-O-methyluridine-3'-phosphate
  modified_base 5: mod_base = OTHER; note = 2'-O-methylcytidine-3'-phosphate
  modified_base 6: mod_base = OTHER; note = 2'-deoxy-2'-fluoroguanosine-3'-phosphate
  modified_base 7: mod_base = OTHER; note = 2'-O-methyladenosine-3'-phosphate
  modified_base 8: mod_base = OTHER; note = 2'-deoxy-2'-fluoroadenosine-3'-phosphate
  modified_base 9: mod_base = OTHER; note = 2'-deoxy-2'-fluorouridine-3'-phosphate
  modified_base 10: mod_base = OTHER; note = 2'-O-methylcytidine-3'-phosphate
  modified_base 11: mod_base = OTHER; note = 2'-O-methyladenosine-3'-phosphate
  modified_base 12: mod_base = OTHER; note = 2'-O-methyladenosine-3'-phosphate
  modified_base 13: mod_base = OTHER; note = 2'-O-methyluridine-3'-phosphate
  modified_base 14: mod_base = OTHER; note = 2'-deoxy-2'-fluorocytidine-3'-phosphate
  modified_base 15: mod_base = OTHER; note = 2'-O-methylcytidine-3'-phosphate
  modified_base 16: mod_base = OTHER; note = 2'-deoxy-2'-fluoroadenosine-3'-phosphate
  modified_base 17: mod_base = OTHER; note = 2'-O-methyladenosine-3'-phosphate
  modified_base 18: mod_base = OTHER; note = 2'-O-methylcytidine-3'-phosphate
  modified_base 19: mod_base = OTHER; note = 2'-O-methyladenosine-3'-phosphate
  modified_base 20: mod_base = OTHER; note = 2'-O-methylguanosine-3'-phosphate
  modified_base 21: mod_base = OTHER; note = 2'-O-methyluridine-3'-phosphorothioate
  modified_base 22: mod_base = OTHER; note = 2'-O-methyladenosine-3'-phosphorothioate
  modified_base 23: mod_base = OTHER; note = 2'-O-methylguanosine
ttttcgaatcaatccaacagtag

SEQ ID NO: 1962 - RNA, 23 nt, synthetic construct
  source 1..23: mol_type = other RNA
  modified_base 1: mod_base = OTHER; note = 2'-O-methyluridine-3'-phosphorothioate 5'-(E)-Vinylphosphonate
  modified_base 2: mod_base = OTHER; note = 2'-deoxy-2'-fluorocytidine-3'-phosphorothioate
  modified_base 3: mod_base = OTHER; note = 2'-O-methyladenosine-3'-phosphate
  modified_base 4: mod_base = OTHER; note = 2'-O-methyladenosine-3'-phosphate
  modified_base 5: mod_base = OTHER; note = 2'-O-methyladenosine-3'-phosphate
  modified_base 6: mod_base = OTHER; note = 2'-deoxy-2'-fluorocytidine-3'-phosphate
  modified_base 7: mod_base = OTHER; note = 2'-O-methyladenosine-3'-phosphate
  modified_base 8: mod_base = OTHER; note = 2'-deoxy-2'-fluoroadenosine-3'-phosphate
  modified_base 9: mod_base = OTHER; note = 2'-deoxy-2'-fluorouridine-3'-phosphate
  modified_base 10: mod_base = OTHER; note = 2'-O-methylguanosine-3'-phosphate
  modified_base 11: mod_base = OTHER; note = 2'-O-methylguanosine-3'-phosphate
  modified_base 12: mod_base = OTHER; note = 2'-O-methyladenosine-3'-phosphate
  modified_base 13: mod_base = OTHER; note = 2'-O-methyladenosine-3'-phosphate
  modified_base 14: mod_base = OTHER; note = 2'-deoxy-2'-fluorouridine-3'-phosphate
  modified_base 15: mod_base = OTHER; note = 2'-O-methylguanosine-3'-phosphate
  modified_base 16: mod_base = OTHER; note = 2'-deoxy-2'-fluoroguanosine-3'-phosphate
  modified_base 17: mod_base = OTHER; note = 2'-O-methyluridine-3'-phosphate
  modified_base 18: mod_base = OTHER; note = 2'-O-methyladenosine-3'-phosphate
  modified_base 19: mod_base = OTHER; note = 2'-O-methyluridine-3'-phosphate
  modified_base 20: mod_base = OTHER; note = 2'-O-methyluridine-3'-phosphate
  modified_base 21: mod_base = OTHER; note = 2'-O-methyluridine-3'-phosphorothioate
  modified_base 22: mod_base = OTHER; note = 2'-O-methyladenosine-3'-phosphorothioate
  modified_base 23: mod_base = OTHER; note = 2'-O-methylguanosine
tcaaacaatggaatggtatttag

SEQ ID NO: 1963 - RNA, 23 nt, synthetic construct
  source 1..23: mol_type = other RNA
  modified_base 1: mod_base = OTHER; note = 2'-O-methyluridine-3'-phosphorothioate 5'-(E)-Vinylphosphonate
  modified_base 2: mod_base = OTHER; note = 2'-deoxy-2'-fluoroguanosine-3'-phosphorothioate
  modified_base 3: mod_base = OTHER; note = 2'-O-methylcytidine-3'-phosphate
  modified_base 4: mod_base = OTHER; note = 2'-O-methyladenosine-3'-phosphate
  modified_base 5: mod_base = OTHER; note = 2'-O-methylcytidine-3'-phosphate
  modified_base 6: mod_base = OTHER; note = 2'-deoxy-2'-fluoroadenosine-3'-phosphate
  modified_base 7: mod_base = OTHER; note = 2'-O-methyladenosine-3'-phosphate
  modified_base 8: mod_base = OTHER; note = 2'-deoxy-2'-fluoroadenosine-3'-phosphate
  modified_base 9: mod_base = OTHER; note = 2'-deoxy-2'-fluorocytidine-3'-phosphate
  modified_base 10: mod_base = OTHER; note = 2'-O-methyladenosine-3'-phosphate
  modified_base 11: mod_base = OTHER; note = 2'-O-methyladenosine-3'-phosphate
  modified_base 12: mod_base = OTHER; note = 2'-O-methyluridine-3'-phosphate
  modified_base 13: mod_base = OTHER; note = 2'-O-methylguanosine-3'-phosphate
  modified_base 14: mod_base = OTHER; note = 2'-deoxy-2'-fluoroguanosine-3'-phosphate
  modified_base 15: mod_base = OTHER; note = 2'-O-methyladenosine-3'-phosphate
  modified_base 16: mod_base = OTHER; note = 2'-deoxy-2'-fluoroadenosine-3'-phosphate
  modified_base 17: mod_base = OTHER; note = 2'-O-methyluridine-3'-phosphate
  modified_base 18: mod_base = OTHER; note = 2'-O-methylguanosine-3'-phosphate
  modified_base 19: mod_base = OTHER; note = 2'-O-methylguanosine-3'-phosphate
  modified_base 20: mod_base = OTHER; note = 2'-O-methyluridine-3'-phosphate
  modified_base 21: mod_base = OTHER; note = 2'-O-methyladenosine-3'-phosphorothioate
  modified_base 22: mod_base = OTHER; note = 2'-O-methyluridine-3'-phosphorothioate
  modified_base 23: mod_base = OTHER; note = 2'-O-methyluridine
tgcacaaacaatggaatggtatt

SEQ ID NO: 1964 - RNA, 23 nt, synthetic construct
  source 1..23: mol_type = other RNA
  modified_base 1: mod_base = OTHER; note = 2'-O-methyluridine-3'-phosphorothioate 5'-(E)-Vinylphosphonate
  modified_base 2: mod_base = OTHER; note = 2'-deoxy-2'-fluorocytidine-3'-phosphorothioate
  modified_base 3: mod_base = OTHER; note = 2'-O-methyluridine-3'-phosphate
  modified_base 4: mod_base = OTHER; note = 2'-O-methylguanosine-3'-phosphate
  modified_base 5: mod_base = OTHER; note = 2'-O-methylcytidine-3'-phosphate
  modified_base 6: mod_base = OTHER; note = 2'-deoxy-2'-fluoroadenosine-3'-phosphate
  modified_base 7: mod_base = OTHER; note = 2'-O-methylcytidine-3'-phosphate
  modified_base 8: mod_base = OTHER; note = 2'-deoxy-2'-fluoroadenosine-3'-phosphate
  modified_base 9: mod_base = OTHER; note = 2'-deoxy-2'-fluoroadenosine-3'-phosphate
  modified_base 10: mod_base = OTHER; note = 2'-O-methyladenosine-3'-phosphate
  modified_base 11: mod_base = OTHER; note = 2'-O-methylcytidine-3'-phosphate
  modified_base 12: mod_base = OTHER; note = 2'-O-methyladenosine-3'-phosphate
  modified_base 13: mod_base = OTHER; note = 2'-O-methyladenosine-3'-phosphate
  modified_base 14: mod_base = OTHER; note = 2'-deoxy-2'-fluorouridine-3'-phosphate
  modified_base 15: mod_base = OTHER; note = 2'-O-methylguanosine-3'-phosphate
  modified_base 16: mod_base = OTHER; note = 2'-deoxy-2'-fluoroguanosine-3'-phosphate
  modified_base 17: mod_base = OTHER; note = 2'-O-methyladenosine-3'-phosphate
  modified_base 18: mod_base = OTHER; note = 2'-O-methyladenosine-3'-phosphate
  modified_base 19: mod_base = OTHER; note = 2'-O-methyluridine-3'-phosphate
  modified_base 20: mod_base = OTHER; note = 2'-O-methylguanosine-3'-phosphate
  modified_base 21: mod_base = OTHER; note = 2'-O-methylguanosine-3'-phosphorothioate
  modified_base 22: mod_base = OTHER; note = 2'-O-methyluridine-3'-phosphorothioate
  modified_base 23: mod_base = OTHER; note = 2'-O-methyladenosine
tctgcacaaacaatggaatggta

SEQ ID NO: 1965 - RNA, 23 nt, synthetic construct
  source 1..23: mol_type = other RNA
  modified_base 1: mod_base = OTHER; note = 2'-O-methyluridine-3'-phosphorothioate 5'-(E)-Vinylphosphonate
  modified_base 2: mod_base = OTHER; note = 2'-deoxy-2'-fluorouridine-3'-phosphorothioate
  modified_base 3: mod_base = OTHER; note = 2'-O-methylguanosine-3'-phosphate
  modified_base 4: mod_base = OTHER; note = 2'-O-methyladenosine-3'-phosphate
  modified_base 5: mod_base = OTHER; note = 2'-O-methylguanosine-3'-phosphate
  modified_base 6: mod_base = OTHER; note = 2'-deoxy-2'-fluorocytidine-3'-phosphate
  modified_base 7: mod_base = OTHER; note = 2'-O-methyladenosine-3'-phosphate
  modified_base 8: mod_base = OTHER; note = 2'-deoxy-2'-fluoroadenosine-3'-phosphate
  modified_base 9: mod_base = OTHER; note = 2'-deoxy-2'-fluoroguanosine-3'-phosphate
  modified_base 10: mod_base = OTHER; note = 2'-O-methyluridine-3'-phosphate
  modified_base 11: mod_base = OTHER; note = 2'-O-methyluridine-3'-phosphate
  modified_base 12: mod_base = OTHER; note = 2'-O-methylcytidine-3'-phosphate
  modified_base 13: mod_base = OTHER; note = 2'-O-methyladenosine-3'-phosphate
  modified_base 14: mod_base = OTHER; note = 2'-deoxy-2'-fluorocytidine-3'-phosphate
  modified_base 15: mod_base = OTHER; note = 2'-O-methyladenosine-3'-phosphate
  modified_base 16: mod_base = OTHER; note = 2'-deoxy-2'-fluoroguanosine-3'-phosphate
  modified_base 17: mod_base = OTHER; note = 2'-O-methyladenosine-3'-phosphate
  modified_base 18: mod_base = OTHER; note = 2'-O-methylguanosine-3'-phosphate
  modified_base 19: mod_base = OTHER; note = 2'-O-methylguanosine-3'-phosphate
  modified_base 20: mod_base = OTHER; note = 2'-O-methyladenosine-3'-phosphate
  modified_base 21: mod_base = OTHER; note = 2'-O-methylcytidine-3'-phosphorothioate
  modified_base 22: mod_base = OTHER; note = 2'-O-methylcytidine-3'-phosphorothioate
  modified_base 23: mod_base = OTHER; note = 2'-O-methylcytidine
ttgagcaagttcacagaggaccc

SEQ ID NO: 1966 - RNA, 23 nt, synthetic construct
  source 1..23: mol_type = other RNA
  modified_base 1: mod_base = OTHER; note = 2'-O-methyluridine-3'-phosphorothioate 5'-(E)-Vinylphosphonate
  modified_base 2: mod_base = OTHER; note = 2'-deoxy-2'-fluorocytidine-3'-phosphorothioate
  modified_base 3: mod_base = OTHER; note = 2'-O-methyluridine-3'-phosphate
  modified_base 4: mod_base = OTHER; note = 2'-O-methylguanosine-3'-phosphate
  modified_base 5: mod_base = OTHER; note = 2'-O-methyladenosine-3'-phosphate
  modified_base 6: mod_base = OTHER; note = 2'-deoxy-2'-fluoroguanosine-3'-phosphate
  modified_base 7: mod_base = OTHER; note = 2'-O-methylcytidine-3'-phosphate
  modified_base 8: mod_base = OTHER; note = 2'-deoxy-2'-fluoroadenosine-3'-phosphate
  modified_base 9: mod_base = OTHER; note = 2'-deoxy-2'-fluoroadenosine-3'-phosphate
  modified_base 10: mod_base = OTHER; note = 2'-O-methylguanosine-3'-phosphate
  modified_base 11: mod_base = OTHER; note = 2'-O-methyluridine-3'-phosphate
  modified_base 12: mod_base = OTHER; note = 2'-O-methyluridine-3'-phosphate
  modified_base 13: mod_base = OTHER; note = 2'-O-methylcytidine-3'-phosphate
  modified_base 14: mod_base = OTHER; note = 2'-deoxy-2'-fluoroadenosine-3'-phosphate
  modified_base 15: mod_base = OTHER; note = 2'-O-methylcytidine-3'-phosphate
  modified_base 16: mod_base = OTHER; note = 2'-deoxy-2'-fluoroadenosine-3'-phosphate
  modified_base 17: mod_base = OTHER; note = 2'-O-methylguanosine-3'-phosphate
  modified_base 18: mod_base = OTHER; note = 2'-O-methyladenosine-3'-phosphate
  modified_base 19: mod_base = OTHER; note = 2'-O-methylguanosine-3'-phosphate
  modified_base 20: mod_base = OTHER; note = 2'-O-methylguanosine-3'-phosphate
  modified_base 21: mod_base = OTHER; note = 2'-O-methyladenosine-3'-phosphorothioate
  modified_base 22: mod_base = OTHER; note = 2'-O-methylcytidine-3'-phosphorothioate
  modified_base 23: mod_base = OTHER; note = 2'-O-methylcytidine
tctgagcaagttcacagaggacc

SEQ ID NO: 1967 - RNA, 23 nt, synthetic construct
  source 1..23: mol_type = other RNA
  modified_base 1: mod_base = OTHER; note = 2'-O-methyluridine-3'-phosphorothioate 5'-(E)-Vinylphosphonate
  modified_base 2: mod_base = OTHER; note = 2'-deoxy-2'-fluoroadenosine-3'-phosphorothioate
  modified_base 3: mod_base = OTHER; note = 2'-O-methylcytidine-3'-phosphate
  modified_base 4: mod_base = OTHER; note = 2'-O-methylcytidine-3'-phosphate
  modified_base 5: mod_base = OTHER; note = 2'-O-methyladenosine-3'-phosphate
  modified_base 6: mod_base = OTHER; note = 2'-deoxy-2'-fluoroguanosine-3'-phosphate
  modified_base 7: mod_base = OTHER; note = 2'-O-methyladenosine-3'-phosphate
  modified_base 8: mod_base = OTHER; note = 2'-deoxy-2'-fluoroguanosine-3'-phosphate
  modified_base 9: mod_base = OTHER; note = 2'-deoxy-2'-fluorouridine-3'-phosphate
  modified_base 10: mod_base = OTHER; note = 2'-O-methylguanosine-3'-phosphate
  modified_base 11: mod_base = OTHER; note = 2'-O-methyladenosine-3'-phosphate
  modified_base 12: mod_base = OTHER; note = 2'-O-methyladenosine-3'-phosphate
  modified_base 13: mod_base = OTHER; note = 2'-O-methyladenosine-3'-phosphate
  modified_base 14: mod_base = OTHER; note = 2'-deoxy-2'-fluoroadenosine-3'-phosphate
  modified_base 15: mod_base = OTHER; note = 2'-O-methylguanosine-3'-phosphate
  modified_base 16: mod_base = OTHER; note = 2'-deoxy-2'-fluoroadenosine-3'-phosphate
  modified_base 17: mod_base = OTHER; note = 2'-O-methyladenosine-3'-phosphate
  modified_base 18: mod_base = OTHER; note = 2'-O-methylcytidine-3'-phosphate
  modified_base 19: mod_base = OTHER; note = 2'-O-methylguanosine-3'-phosphate
  modified_base 20: mod_base = OTHER; note = 2'-O-methyladenosine-3'-phosphate
  modified_base 21: mod_base = OTHER; note = 2'-O-methyluridine-3'-phosphorothioate
  modified_base 22: mod_base = OTHER; note = 2'-O-methyladenosine-3'-phosphorothioate
  modified_base 23: mod_base = OTHER; note = 2'-O-methylguanosine
taccagagtgaaaagaacgatag

SEQ ID NO: 1968 - RNA, 23 nt, synthetic construct
  source 1..23: mol_type = other RNA
  modified_base 1: mod_base = OTHER; note = 2'-O-methyluridine-3'-phosphorothioate 5'-(E)-Vinylphosphonate
  modified_base 2: mod_base = OTHER; note = 2'-deoxy-2'-fluorocytidine-3'-phosphorothioate
  modified_base 3: mod_base = OTHER; note = 2'-O-methyladenosine-3'-phosphate
  modified_base 4: mod_base = OTHER; note = 2'-O-methylcytidine-3'-phosphate
  modified_base 5: mod_base = OTHER; note = 2'-O-methylcytidine-3'-phosphate
  modified_base 6: mod_base = OTHER; note = 2'-deoxy-2'-fluoroadenosine-3'-phosphate
  modified_base 7: mod_base = OTHER; note = 2'-O-methylguanosine-3'-phosphate
  modified_base 8: mod_base = OTHER; note = 2'-deoxy-2'-fluoroadenosine-3'-phosphate
  modified_base 9: mod_base = OTHER; note = 2'-deoxy-2'-fluoroguanosine-3'-phosphate
  modified_base 10: mod_base = OTHER; note = 2'-O-methyluridine-3'-phosphate
  modified_base 11: mod_base = OTHER; note = 2'-O-methylguanosine-3'-phosphate
  modified_base 12: mod_base = OTHER; note = 2'-O-methyladenosine-3'-phosphate
  modified_base 13: mod_base = OTHER; note = 2'-O-methyladenosine-3'-phosphate
  modified_base 14: mod_base = OTHER; note = 2'-deoxy-2'-fluoroadenosine-3'-phosphate
  modified_base 15: mod_base = OTHER; note = 2'-O-methyladenosine-3'-phosphate
  modified_base 16: mod_base = OTHER; note = 2'-deoxy-2'-fluoroguanosine-3'-phosphate
  modified_base 17: mod_base = OTHER; note = 2'-O-methyladenosine-3'-phosphate
  modified_base 18: mod_base = OTHER; note = 2'-O-methyladenosine-3'-phosphate
  modified_base 19: mod_base = OTHER; note = 2'-O-methylcytidine-3'-phosphate
  modified_base 20: mod_base = OTHER; note = 2'-O-methylguanosine-3'-phosphate
  modified_base 21: mod_base = OTHER; note = 2'-O-methyladenosine-3'-phosphorothioate
  modified_base 22: mod_base = OTHER; note = 2'-O-methyluridine-3'-phosphorothioate
  modified_base 23: mod_base = OTHER; note = 2'-O-methyladenosine
tcaccagagtgaaaagaacgata

SEQ ID NO: 1969 - RNA, 23 nt, synthetic construct
  source 1..23: mol_type = other RNA
  modified_base 1: mod_base = OTHER; note = 2'-O-methyluridine-3'-phosphorothioate 5'-(E)-Vinylphosphonate
  modified_base 2: mod_base = OTHER; note = 2'-deoxy-2'-fluorocytidine-3'-phosphorothioate
  modified_base 3: mod_base = OTHER; note = 2'-O-methyladenosine-3'-phosphate
  modified_base 4: mod_base = OTHER; note = 2'-O-methyladenosine-3'-phosphate
  modified_base 5: mod_base = OTHER; note = 2'-O-methylcytidine-3'-phosphate
  modified_base 6: mod_base = OTHER; note = 2'-deoxy-2'-fluorouridine-3'-phosphate
  modified_base 7: mod_base = OTHER; note = 2'-O-methylguanosine-3'-phosphate
  modified_base 8: mod_base = OTHER; note = 2'-deoxy-2'-fluoroguanosine-3'-phosphate
  modified_base 9: mod_base = OTHER; note = 2'-deoxy-2'-fluoroadenosine-3'-phosphate
  modified_base 10: mod_base = OTHER; note = 2'-O-methyluridine-3'-phosphate
  modified_base 11: mod_base = OTHER; note = 2'-O-methyladenosine-3'-phosphate
  modified_base 12: mod_base = OTHER; note = 2'-O-methylguanosine-3'-phosphate
  modified_base 13: mod_base = OTHER; note = 2'-O-methyluridine-3'-phosphate
  modified_base 14: mod_base = OTHER; note = 2'-deoxy-2'-fluorocytidine-3'-phosphate
  modified_base 15: mod_base = OTHER; note = 2'-O-methyladenosine-3'-phosphate
  modified_base 16: mod_base = OTHER; note = 2'-deoxy-2'-fluoroguanosine-3'-phosphate
  modified_base 17: mod_base = OTHER; note = 2'-O-methylcytidine-3'-phosphate
  modified_base 18: mod_base = OTHER; note = 2'-O-methyladenosine-3'-phosphate
  modified_base 19: mod_base = OTHER; note = 2'-O-methylcytidine-3'-phosphate
  modified_base 20: mod_base = OTHER; note = 2'-O-methylcytidine-3'-phosphate
  modified_base 21: mod_base = OTHER; note = 2'-O-methyladenosine-3'-phosphorothioate
  modified_base 22: mod_base = OTHER; note = 2'-O-methylguanosine-3'-phosphorothioate
  modified_base 23: mod_base = OTHER; note = 2'-O-methylguanosine
tcaactggatagtcagcaccagg

SEQ ID NO: 1970 - RNA, 23 nt, synthetic construct
  source 1..23: mol_type = other RNA
  modified_base 1: mod_base = OTHER; note = 2'-O-methyluridine-3'-phosphorothioate 5'-(E)-Vinylphosphonate
  modified_base 2: mod_base = OTHER; note = 2'-deoxy-2'-fluorocytidine-3'-phosphorothioate
  modified_base 3: mod_base = OTHER; note = 2'-O-methylcytidine-3'-phosphate
  modified_base 4: mod_base = OTHER; note = 2'-O-methyladenosine-3'-phosphate
  modified_base 5: mod_base = OTHER; note = 2'-O-methyluridine-3'-phosphate
  modified_base 6: mod_base = OTHER; note = 2'-deoxy-2'-fluorocytidine-3'-phosphate
  modified_base 7: mod_base = OTHER; note = 2'-O-methyladenosine-3'-phosphate
  modified_base 8: mod_base = OTHER; note = 2'-deoxy-2'-fluoroadenosine-3'-phosphate
  modified_base 9: mod_base = OTHER; note = 2'-deoxy-2'-fluorocytidine-3'-phosphate
  modified_base 10: mod_base = OTHER; note = 2'-O-methyluridine-3'-phosphate
  modified_base 11: mod_base = OTHER; note = 2'-O-methylguanosine-3'-phosphate
  modified_base 12: mod_base = OTHER; note = 2'-O-methylguanosine-3'-phosphate
  modified_base 13: mod_base = OTHER; note = 2'-O-methyladenosine-3'-phosphate
  modified_base 14: mod_base = OTHER; note = 2'-deoxy-2'-fluorouridine-3'-phosphate
  modified_base 15: mod_base = OTHER; note = 2'-O-methyladenosine-3'-phosphate
  modified_base 16: mod_base = OTHER; note = 2'-deoxy-2'-fluoroguanosine-3'-phosphate
  modified_base 17: mod_base = OTHER; note = 2'-O-methyluridine-3'-phosphate
  modified_base 18: mod_base = OTHER; note = 2'-O-methylcytidine-3'-phosphate
  modified_base 19: mod_base = OTHER; note = 2'-O-methyladenosine-3'-phosphate
  modified_base 20: mod_base = OTHER; note = 2'-O-methylguanosine-3'-phosphate
  modified_base 21: mod_base = OTHER; note = 2'-O-methylcytidine-3'-phosphorothioate
  modified_base 22: mod_base = OTHER; note = 2'-O-methyladenosine-3'-phosphorothioate
  modified_base 23: mod_base = OTHER; note = 2'-O-methylcytidine
tccatcaactggatagtcagcac

SEQ ID NO: 1971 - RNA, 23 nt, synthetic construct
  source 1..23: mol_type = other RNA
  modified_base 1: mod_base = OTHER; note = 2'-O-methyluridine-3'-phosphorothioate 5'-(E)-Vinylphosphonate
  modified_base 2: mod_base = OTHER; note = 2'-deoxy-2'-fluorocytidine-3'-phosphorothioate
  modified_base 3: mod_base = OTHER; note = 2'-O-methylcytidine-3'-phosphate
  modified_base 4: mod_base = OTHER; note = 2'-O-methylcytidine-3'-phosphate
  modified_base 5: mod_base = OTHER; note = 2'-O-methyladenosine-3'-phosphate
  modified_base 6: mod_base = OTHER; note = 2'-deoxy-2'-fluorouridine-3'-phosphate
  modified_base 7: mod_base = OTHER; note = 2'-O-methylcytidine-3'-phosphate
  modified_base 8: mod_base = OTHER; note = 2'-deoxy-2'-fluoroadenosine-3'-phosphate
  modified_base 9: mod_base = OTHER; note = 2'-deoxy-2'-fluoroadenosine-3'-phosphate
  modified_base 10: mod_base = OTHER; note = 2'-O-methylcytidine-3'-phosphate
  modified_base 11: mod_base = OTHER; note = 2'-O-methyluridine-3'-phosphate
  modified_base 12: mod_base = OTHER; note = 2'-O-methylguanosine-3'-phosphate
  modified_base 13: mod_base = OTHER; note = 2'-O-methylguanosine-3'-phosphate
  modified_base 14: mod_base = OTHER; note = 2'-deoxy-2'-fluoroadenosine-3'-phosphate
  modified_base 15: mod_base = OTHER; note = 2'-O-methyluridine-3'-phosphate
  modified_base 16: mod_base = OTHER; note = 2'-deoxy-2'-fluoroadenosine-3'-phosphate
  modified_base 17: mod_base = OTHER; note = 2'-O-methylguanosine-3'-phosphate
  modified_base 18: mod_base = OTHER; note = 2'-O-methyluridine-3'-phosphate
  modified_base 19: mod_base = OTHER; note = 2'-O-methylcytidine-3'-phosphate
  modified_base 20: mod_base = OTHER; note = 2'-O-methyladenosine-3'-phosphate
  modified_base 21: mod_base = OTHER; note = 2'-O-methylguanosine-3'-phosphorothioate
  modified_base 22: mod_base = OTHER; note = 2'-O-methylcytidine-3'-phosphorothioate
  modified_base 23: mod_base = OTHER; note = 2'-O-methyladenosine
tcccatcaactggatagtcagca

SEQ ID NO: 1972 - RNA, 23 nt, synthetic construct
  source 1..23: mol_type = other RNA
  modified_base 1: mod_base = OTHER; note = 2'-O-methyluridine-3'-phosphorothioate 5'-(E)-Vinylphosphonate
  modified_base 2: mod_base = OTHER; note = 2'-deoxy-2'-fluoroadenosine-3'-phosphorothioate
  modified_base 3: mod_base = OTHER; note = 2'-O-methylguanosine-3'-phosphate
  modified_base 4: mod_base = OTHER; note = 2'-O-methylcytidine-3'-phosphate
  modified_base 5: mod_base = OTHER; note = 2'-O-methylcytidine-3'-phosphate
  modified_base 6: mod_base = OTHER; note = 2'-deoxy-2'-fluorocytidine-3'-phosphate
  modified_base 7: mod_base = OTHER; note = 2'-O-methyladenosine-3'-phosphate
  modified_base 8: mod_base = OTHER; note = 2'-deoxy-2'-fluorouridine-3'-phosphate
  modified_base 9: mod_base = OTHER; note = 2'-deoxy-2'-fluorocytidine-3'-phosphate
  modified_base 10: mod_base = OTHER; note = 2'-O-methyladenosine-3'-phosphate
  modified_base 11: mod_base = OTHER; note = 2'-O-methyladenosine-3'-phosphate
  modified_base 12: mod_base = OTHER; note = 2'-O-methylcytidine-3'-phosphate
  modified_base 13: mod_base = OTHER; note = 2'-O-methyluridine-3'-phosphate
  modified_base 14: mod_base = OTHER; note = 2'-deoxy-2'-fluoroguanosine-3'-phosphate
  modified_base 15: mod_base = OTHER; note = 2'-O-methylguanosine-3'-phosphate
  modified_base 16: mod_base = OTHER; note = 2'-deoxy-2'-fluoroadenosine-3'-phosphate
  modified_base 17: mod_base = OTHER; note = 2'-O-methyluridine-3'-phosphate
  modified_base 18: mod_base = OTHER; note = 2'-O-methyladenosine-3'-phosphate
  modified_base 19: mod_base = OTHER; note = 2'-O-methylguanosine-3'-phosphate
  modified_base 20: mod_base = OTHER; note = 2'-O-methyluridine-3'-phosphate
  modified_base 21: mod_base = OTHER; note = 2'-O-methylcytidine-3'-phosphorothioate
  modified_base 22: mod_base = OTHER; note = 2'-O-methyladenosine-3'-phosphorothioate
  modified_base 23: mod_base = OTHER; note = 2'-O-methylguanosine
tagcccatcaactggatagtcag

SEQ ID NO: 1973 - RNA, 23 nt, synthetic construct
  source 1..23: mol_type = other RNA
  modified_base 1: mod_base = OTHER; note = 2'-O-methyluridine-3'-phosphorothioate 5'-(E)-Vinylphosphonate
  modified_base 2: mod_base = OTHER; note = 2'-deoxy-2'-fluorocytidine-3'-phosphorothioate
  modified_base 3: mod_base = OTHER; note = 2'-O-methyladenosine-3'-phosphate
  modified_base 4: mod_base = OTHER; note = 2'-O-methylguanosine-3'-phosphate
  modified_base 5: mod_base = OTHER; note = 2'-O-methylcytidine-3'-phosphate
  modified_base 6: mod_base = OTHER; note = 2'-deoxy-2'-fluoroadenosine-3'-phosphate
  modified_base 7: mod_base = OTHER; note = 2'-O-methyladenosine-3'-phosphate
  modified_base 8: mod_base = OTHER; note = 2'-deoxy-2'-fluorocytidine-3'-phosphate
  modified_base 9: mod_base = OTHER; note = 2'-deoxy-2'-fluorouridine-3'-phosphate
  modified_base 10: mod_base = OTHER; note = 2'-O-methylcytidine-3'-phosphate
  modified_base 11: mod_base = OTHER; note = 2'-O-methyluridine-3'-phosphate
  modified_base 12: mod_base = OTHER; note = 2'-O-methyladenosine-3'-phosphate
  modified_base 13: mod_base = OTHER; note = 2'-O-methylcytidine-3'-phosphate
  modified_base 14: mod_base = OTHER; note = 2'-deoxy-2'-fluoroadenosine-3'-phosphate
  modified_base 15: mod_base = OTHER; note = 2'-O-methylguanosine-3'-phosphate
  modified_base 16: mod_base = OTHER; note = 2'-deoxy-2'-fluoroguanosine-3'-phosphate
  modified_base 17: mod_base = OTHER; note = 2'-O-methylcytidine-3'-phosphate
  modified_base 18: mod_base = OTHER; note = 2'-O-methylcytidine-3'-phosphate
  modified_base 19: mod_base = OTHER; note = 2'-O-methyladenosine-3'-phosphate
  modified_base 20: mod_base = OTHER; note = 2'-O-methyladenosine-3'-phosphate
  modified_base 21: mod_base = OTHER; note = 2'-O-methyluridine-3'-phosphorothioate
  modified_base 22: mod_base = OTHER; note = 2'-O-methylcytidine-3'-phosphorothioate
  modified_base 23: mod_base = OTHER; note = 2'-O-methyladenosine
tcagcaactctacaggccaatca

SEQ ID NO: 1974 - RNA, 23 nt, synthetic construct
  source 1..23: mol_type = other RNA
  modified_base 1: mod_base = OTHER; note = 2'-O-methyluridine-3'-phosphorothioate 5'-(E)-Vinylphosphonate
  modified_base 2: mod_base = OTHER; note = 2'-deoxy-2'-fluorocytidine-3'-phosphorothioate
  modified_base 3: mod_base = OTHER; note = 2'-O-methyladenosine-3'-phosphate
  modified_base 4: mod_base = OTHER; note = 2'-O-methylcytidine-3'-phosphate
  modified_base 5: mod_base = OTHER; note = 2'-O-methyluridine-3'-phosphate
  modified_base 6: mod_base = OTHER; note = 2'-deoxy-2'-fluorouridine-3'-phosphate
  modified_base 7: mod_base = OTHER; note = 2'-O-methyluridine-3'-phosphate
  modified_base 8: mod_base = OTHER; note = 2'-deoxy-2'-fluorocytidine-3'-phosphate
  modified_base 9: mod_base = OTHER; note = 2'-deoxy-2'-fluorouridine-3'-phosphate
  modified_base 10: mod_base = OTHER; note = 2'-O-methylguanosine-3'-phosphate
  modified_base 11: mod_base = OTHER; note = 2'-O-methyladenosine-3'-phosphate
  modified_base 12: mod_base = OTHER; note = 2'-O-methylguanosine-3'-phosphate
  modified_base 13: mod_base = OTHER; note = 2'-O-methyladenosine-3'-phosphate
  modified_base 14: mod_base = OTHER; note = 2'-deoxy-2'-fluorouridine-3'-phosphate
  modified_base 15: mod_base = OTHER; note = 2'-O-methyladenosine-3'-phosphate
  modified_base 16: mod_base = OTHER; note = 2'-deoxy-2'-fluorocytidine-3'-phosphate
  modified_base 17: mod_base = OTHER; note = 2'-O-methylcytidine-3'-phosphate
  modified_base 18: mod_base = OTHER; note = 2'-O-methyladenosine-3'-phosphate
  modified_base 19: mod_base = OTHER; note = 2'-O-methylguanosine-3'-phosphate
  modified_base 20: mod_base = OTHER; note = 2'-O-methylcytidine-3'-phosphate
  modified_base 21: mod_base = OTHER; note = 2'-O-methylcytidine-3'-phosphorothioate
  modified_base 22: mod_base = OTHER; note = 2'-O-methylcytidine-3'-phosphorothioate
  modified_base 23: mod_base = OTHER; note = 2'-O-methyladenosine
tcactttctgagataccagccca

SEQ ID NO: 1975 - RNA, 23 nt, synthetic construct
  source 1..23: mol_type = other RNA
  modified_base 1: mod_base = OTHER; note = 2'-O-methyluridine-3'-phosphorothioate 5'-(E)-Vinylphosphonate
  modified_base 2: mod_base = OTHER; note = 2'-deoxy-2'-fluoroguanosine-3'-phosphorothioate
  modified_base 3: mod_base = OTHER; note = 2'-O-methylcytidine-3'-phosphate
  modified_base 4: mod_base = OTHER; note = 2'-O-methyladenosine-3'-phosphate
  modified_base 5: mod_base = OTHER; note = 2'-O-methylcytidine-3'-phosphate
  modified_base 6: mod_base = OTHER; note = 2'-deoxy-2'-fluorouridine-3'-phosphate
  modified_base 7: mod_base = OTHER; note = 2'-O-methyluridine-3'-phosphate
  modified_base 8: mod_base = OTHER; note = 2'-deoxy-2'-fluorouridine-3'-phosphate
  modified_base 9: mod_base = OTHER; note = 2'-deoxy-2'-fluorocytidine-3'-phosphate
  modified_base 10: mod_base = OTHER; note = 2'-O-methyluridine-3'-phosphate
  modified_base 11: mod_base = OTHER; note = 2'-O-methylguanosine-3'-phosphate
  modified_base 12: mod_base = OTHER; note = 2'-O-methyladenosine-3'-phosphate
  modified_base 13: mod_base = OTHER; note = 2'-O-methylguanosine-3'-phosphate
  modified_base 14: mod_base = OTHER; note = 2'-deoxy-2'-fluoroadenosine-3'-phosphate
  modified_base 15: mod_base = OTHER; note = 2'-O-methyluridine-3'-phosphate
  modified_base 16: mod_base = OTHER; note = 2'-deoxy-2'-fluoroadenosine-3'-phosphate
  modified_base 17: mod_base = OTHER; note = 2'-O-methylcytidine-3'-phosphate
  modified_base 18: mod_base = OTHER; note = 2'-O-methylcytidine-3'-phosphate
  modified_base 19: mod_base = OTHER; note = 2'-O-methyladenosine-3'-phosphate
  modified_base 20: mod_base = OTHER; note = 2'-O-methylguanosine-3'-phosphate
  modified_base 21: mod_base = OTHER; note = 2'-O-methylcytidine-3'-phosphorothioate
  modified_base 22: mod_base = OTHER; note = 2'-O-methylcytidine-3'-phosphorothioate
  modified_base 23: mod_base = OTHER; note = 2'-O-methylcytidine
tgcactttctgagataccagccc

SEQ ID NO: 1976 - RNA, 23 nt, synthetic construct
  source 1..23: mol_type = other RNA
  modified_base 1: mod_base = OTHER; note = 2'-O-methyluridine-3'-phosphorothioate 5'-(E)-Vinylphosphonate
  modified_base 2: mod_base = OTHER; note = 2'-deoxy-2'-fluoroadenosine-3'-phosphorothioate
  modified_base 3: mod_base = OTHER; note = 2'-O-methylguanosine-3'-phosphate
  modified_base 4: mod_base = OTHER; note = 2'-O-methylguanosine-3'-phosphate
  modified_base 5: mod_base = OTHER; note = 2'-O-methylcytidine-3'-phosphate
  modified_base 6: mod_base = OTHER; note = 2'-deoxy-2'-fluoroadenosine-3'-phosphate
  modified_base 7: mod_base = OTHER; note = 2'-O-methylcytidine-3'-phosphate
  modified_base 8: mod_base = OTHER; note = 2'-deoxy-2'-fluorouridine-3'-phosphate
  modified_base 9: mod_base = OTHER; note = 2'-deoxy-2'-fluorouridine-3'-phosphate
  modified_base 10: mod_base = OTHER; note = 2'-O-methyluridine-3'-phosphate
  modified_base 11: mod_base = OTHER; note = 2'-O-methylcytidine-3'-phosphate
  modified_base 12: mod_base = OTHER; note = 2'-O-methyluridine-3'-phosphate
  modified_base 13: mod_base = OTHER; note = 2'-O-methylguanosine-3'-phosphate
  modified_base 14: mod_base = OTHER; note = 2'-deoxy-2'-fluoroadenosine-3'-phosphate
  modified_base 15: mod_base = OTHER; note = 2'-O-methylguanosine-3'-phosphate
  modified_base 16: mod_base = OTHER; note = 2'-deoxy-2'-fluoroadenosine-3'-phosphate
  modified_base 17: mod_base = OTHER; note = 2'-O-methyluridine-3'-phosphate
  modified_base 18: mod_base = OTHER; note = 2'-O-methyladenosine-3'-phosphate
  modified_base 19: mod_base = OTHER; note = 2'-O-methylcytidine-3'-phosphate
  modified_base 20: mod_base = OTHER; note = 2'-O-methylcytidine-3'-phosphate
  modified_base 21: mod_base = OTHER; note = 2'-O-methyladenosine-3'-phosphorothioate
  modified_base 22: mod_base = OTHER; note = 2'-O-methylguanosine-3'-phosphorothioate
  modified_base 23: mod_base = OTHER; note = 2'-O-methylcytidine
taggcactttctgagataccagc

SEQ ID NO: 1977 - RNA, 23 nt, synthetic construct
  source 1..23: mol_type = other RNA
  modified_base 1: mod_base = OTHER; note = 2'-O-methyluridine-3'-phosphorothioate 5'-(E)-Vinylphosphonate
  modified_base 2: mod_base = OTHER; note = 2'-deoxy-2'-fluorocytidine-3'-phosphorothioate
  modified_base 3: mod_base = OTHER; note = 2'-O-methyladenosine-3'-phosphate
  modified_base 4: mod_base = OTHER; note = 2'-O-methylguanosine-3'-phosphate
  modified_base 5: mod_base = OTHER; note = 2'-O-methylcytidine-3'-phosphate
  modified_base 6: mod_base = OTHER; note = 2'-deoxy-2'-fluorouridine-3'-phosphate
  modified_base 7: mod_base = OTHER; note = 2'-O-methyluridine-3'-phosphate
  modified_base 8: mod_base = OTHER; note = 2'-deoxy-2'-fluoroguanosine-3'-phosphate
  modified_base 9: mod_base = OTHER; note = 2'-deoxy-2'-fluoroguanosine-3'-phosphate
  modified_base 10: mod_base = OTHER; note = 2'-O-methyluridine-3'-phosphate
  modified_base 11: mod_base = OTHER; note = 2'-O-methyluridine-3'-phosphate
  modified_base 12: mod_base = OTHER; note = 2'-O-methyladenosine-3'-phosphate
  modified_base 13: mod_base = OTHER; note = 2'-O-methylguanosine-3'-phosphate
  modified_base 14: mod_base = OTHER; note = 2'-deoxy-2'-fluorouridine-3'-phosphate
  modified_base 15: mod_base = OTHER; note = 2'-O-methylguanosine-3'-phosphate
  modified_base 16: mod_base = OTHER; note = 2'-deoxy-2'-fluorouridine-3'-phosphate
  modified_base 17: mod_base = OTHER; note = 2'-O-methylguanosine-3'-phosphate
  modified_base 18: mod_base = OTHER; note = 2'-O-methyluridine-3'-phosphate
  modified_base 19: mod_base = OTHER; note = 2'-O-methylcytidine-3'-phosphate
  modified_base 20: mod_base = OTHER; note = 2'-O-methyladenosine-3'-phosphate
  modified_base 21: mod_base = OTHER; note = 2'-O-methylguanosine-3'-phosphorothioate
  modified_base 22: mod_base = OTHER; note = 2'-O-methylguanosine-3'-phosphorothioate
  modified_base 23: mod_base = OTHER; note = 2'-O-methylcytidine
tcagcttggttagtgtgtcaggc

SEQ ID NO: 1978 - RNA, 23 nt, synthetic construct
  source 1..23: mol_type = other RNA
  modified_base 1: mod_base = OTHER; note = 2'-O-methyluridine-3'-phosphorothioate 5'-(E)-Vinylphosphonate
  modified_base 2: mod_base = OTHER; note = 2'-deoxy-2'-fluoroadenosine-3'-phosphorothioate
  modified_base 3: mod_base = OTHER; note = 2'-O-methyluridine-3'-phosphate
  modified_base 4: mod_base = OTHER; note = 2'-O-methyladenosine-3'-phosphate
  modified_base 5: mod_base = OTHER; note = 2'-O-methylguanosine-3'-phosphate
  modified_base 6: mod_base = OTHER; note = 2'-deoxy-2'-fluoroguanosine-3'-phosphate
  modified_base 7: mod_base = OTHER; note = 2'-O-methyladenosine-3'-phosphate
  modified_base 8: mod_base = OTHER; note = 2'-deoxy-2'-fluoroadenosine-3'-phosphate
  modified_base 9: mod_base = OTHER; note = 2'-deoxy-2'-fluoroadenosine-3'-phosphate
  modified_base 10: mod_base = OTHER; note = 2'-O-methylcytidine-3'-phosphate
  modified_base 11: mod_base = OTHER; note = 2'-O-methyluridine-3'-phosphate
  modified_base 12: mod_base = OTHER; note = 2'-O-methylcytidine-3'-phosphate
  modified_base 13: mod_base = OTHER; note = 2'-O-methyladenosine-3'-phosphate
  modified_base 14: mod_base = OTHER; note = 2'-deoxy-2'-fluoroguanosine-3'-phosphate
  modified_base 15: mod_base = OTHER; note = 2'-O-methylcytidine-3'-phosphate
  modified_base 16: mod_base = OTHER; note = 2'-deoxy-2'-fluorouridine-3'-phosphate
  modified_base 17: mod_base = OTHER; note = 2'-O-methyluridine-3'-phosphate
  modified_base 18: mod_base = OTHER; note = 2'-O-methylguanosine-3'-phosphate
  modified_base 19: mod_base = OTHER; note = 2'-O-methylguanosine-3'-phosphate
  modified_base 20: mod_base = OTHER; note = 2'-O-methyluridine-3'-phosphate
  modified_base 21: mod_base = OTHER; note = 2'-O-methyluridine-3'-phosphorothioate
  modified_base 22: mod_base = OTHER; note = 2'-O-methyladenosine-3'-phosphorothioate
  modified_base 23: mod_base = OTHER; note = 2'-O-methylguanosine
tataggaaactcagcttggttag

SEQ ID NO: 1979 - RNA, 23 nt, synthetic construct
  source 1..23: mol_type = other RNA
  modified_base 1: mod_base = OTHER; note = 2'-O-methyluridine-3'-phosphorothioate 5'-(E)-Vinylphosphonate
  modified_base 2: mod_base = OTHER; note = 2'-deoxy-2'-fluorocytidine-3'-phosphorothioate
  modified_base 3: mod_base = OTHER; note = 2'-O-methylcytidine-3'-phosphate
  modified_base 4: mod_base = OTHER; note = 2'-O-methyladenosine-3'-phosphate
  modified_base 5: mod_base = OTHER; note = 2'-O-methyluridine-3'-phosphate
  modified_base 6: mod_base = OTHER; note = 2'-deoxy-2'-fluoroadenosine-3'-phosphate
  modified_base 7: mod_base = OTHER; note = 2'-O-methylguanosine-3'-phosphate
  modified_base 8: mod_base = OTHER; note = 2'-deoxy-2'-fluoroguanosine-3'-phosphate
  modified_base 9: mod_base = OTHER; note = 2'-deoxy-2'-fluoroadenosine-3'-phosphate
  modified_base 10: mod_base = OTHER; note = 2'-O-methyladenosine-3'-phosphate
  modified_base 11: mod_base = OTHER; note = 2'-O-methyladenosine-3'-phosphate
  modified_base 12: mod_base = OTHER; note = 2'-O-methylcytidine-3'-phosphate
  modified_base 13: mod_base = OTHER; note = 2'-O-methyluridine-3'-phosphate
  modified_base 14: mod_base = OTHER; note = 2'-deoxy-2'-fluorocytidine-3'-phosphate
  modified_base 15: mod_base = OTHER; note = 2'-O-methyladenosine-3'-phosphate
  modified_base 16: mod_base = OTHER; note = 2'-deoxy-2'-fluoroguanosine-3'-phosphate
  modified_base 17: mod_base = OTHER; note = 2'-O-methylcytidine-3'-phosphate
  modified_base 18: mod_base = OTHER; note = 2'-O-methyluridine-3'-phosphate
  modified_base 19: mod_base = OTHER; note = 2'-O-methyluridine-3'-phosphate
  modified_base 20: mod_base = OTHER; note = 2'-O-methylguanosine-3'-phosphate
  modified_base 21: mod_base = OTHER; note = 2'-O-methylguanosine-3'-phosphorothioate
  modified_base 22: mod_base = OTHER; note = 2'-O-methyluridine-3'-phosphorothioate
  modified_base 23: mod_base = OTHER; note = 2'-O-methyluridine
tccataggaaactcagcttggtt

SEQ ID NO: 1980 - RNA, 23 nt, synthetic construct
  source 1..23: mol_type = other RNA
  modified_base 1: mod_base = OTHER; note = 2'-O-methyluridine-3'-phosphorothioate 5'-(E)-Vinylphosphonate
  modified_base 2: mod_base = OTHER; note = 2'-deoxy-2'-fluorocytidine-3'-phosphorothioate
  modified_base 3: mod_base = OTHER; note = 2'-O-methylcytidine-3'-phosphate
  modified_base 4: mod_base = OTHER; note = 2'-O-methylcytidine-3'-phosphate
  modified_base 5: mod_base = OTHER; note = 2'-O-methyladenosine-3'-phosphate
  modified_base 6: mod_base = OTHER; note = 2'-deoxy-2'-fluorouridine-3'-phosphate
  modified_base 7: mod_base = OTHER; note = 2'-O-methyladenosine-3'-phosphate
  modified_base 8: mod_base = OTHER; note = 2'-deoxy-2'-fluoroguanosine-3'-phosphate
  modified_base 9: mod_base = OTHER; note = 2'-deoxy-2'-fluoroguanosine-3'-phosphate
  modified_base 10: mod_base = OTHER; note = 2'-O-methyladenosine-3'-phosphate
  modified_base 11: mod_base = OTHER; note = 2'-O-methyladenosine-3'-phosphate
  modified_base 12: mod_base = OTHER; note = 2'-O-methyladenosine-3'-phosphate
  modified_base 13: mod_base = OTHER; note = 2'-O-methylcytidine-3'-phosphate
  modified_base 14: mod_base = OTHER; note = 2'-deoxy-2'-fluorouridine-3'-phosphate
  modified_base 15: mod_base = OTHER; note = 2'-O-methylcytidine-3'-phosphate
  modified_base 16: mod_base = OTHER; note = 2'-deoxy-2'-fluoroadenosine-3'-phosphate
  modified_base 17: mod_base = OTHER; note = 2'-O-methylguanosine-3'-phosphate
  modified_base 18: mod_base = OTHER; note = 2'-O-methylcytidine-3'-phosphate
  modified_base 19: mod_base = OTHER; note = 2'-O-methyluridine-3'-phosphate
  modified_base 20: mod_base = OTHER; note = 2'-O-methyluridine-3'-phosphate
  modified_base 21: mod_base = OTHER; note = 2'-O-methylguanosine-3'-phosphorothioate
  modified_base 22: mod_base = OTHER; note = 2'-O-methylguanosine-3'-phosphorothioate
  modified_base 23: mod_base = OTHER; note = 2'-O-methyluridine
tcccataggaaactcagcttggt

SEQ ID NO: 1981 - RNA, 23 nt, synthetic construct
  source 1..23: mol_type = other RNA
  modified_base 1: mod_base = OTHER; note = 2'-O-methyluridine-3'-phosphorothioate 5'-(E)-Vinylphosphonate
  modified_base 2: mod_base = OTHER; note = 2'-deoxy-2'-fluorouridine-3'-phosphorothioate
  modified_base 3: mod_base = OTHER; note = 2'-O-methylcytidine-3'-phosphate
  modified_base 4: mod_base = OTHER; note = 2'-O-methylcytidine-3'-phosphate
  modified_base 5: mod_base = OTHER; note = 2'-O-methylcytidine-3'-phosphate
  modified_base 6: mod_base = OTHER; note = 2'-deoxy-2'-fluoroadenosine-3'-phosphate
  modified_base 7: mod_base = OTHER; note = 2'-O-methyluridine-3'-phosphate
  modified_base 8: mod_base = OTHER; note = 2'-deoxy-2'-fluoroadenosine-3'-phosphate
  modified_base 9: mod_base = OTHER; note = 2'-deoxy-2'-fluoroguanosine-3'-phosphate
  modified_base 10: mod_base = OTHER; note = 2'-O-methylguanosine-3'-phosphate
  modified_base 11: mod_base = OTHER; note = 2'-O-methyladenosine-3'-phosphate
  modified_base 12: mod_base = OTHER; note = 2'-O-methyladenosine-3'-phosphate
  modified_base 13: mod_base = OTHER; note = 2'-O-methyladenosine-3'-phosphate
  modified_base 14: mod_base = OTHER; note = 2'-deoxy-2'-fluorocytidine-3'-phosphate
  modified_base 15: mod_base = OTHER; note = 2'-O-methyluridine-3'-phosphate
  modified_base 16: mod_base = OTHER; note = 2'-deoxy-2'-fluorocytidine-3'-phosphate
  modified_base 17: mod_base = OTHER; note = 2'-O-methyladenosine-3'-phosphate
  modified_base 18: mod_base = OTHER; note = 2'-O-methylguanosine-3'-phosphate
  modified_base 19: mod_base = OTHER; note = 2'-O-methylcytidine-3'-phosphate
  modified_base 20: mod_base = OTHER; note = 2'-O-methyluridine-3'-phosphate
  modified_base 21: mod_base = OTHER; note = 2'-O-methyluridine-3'-phosphorothioate
  modified_base 22: mod_base = OTHER; note = 2'-O-methylguanosine-3'-phosphorothioate
  modified_base 23: mod_base = OTHER; note = 2'-O-methylguanosine
ttcccataggaaactcagcttgg

SEQ ID NO: 1982 - RNA, 23 nt, synthetic construct
  source 1..23: mol_type = other RNA
  modified_base 1: mod_base = OTHER; note = 2'-O-methyluridine-3'-phosphorothioate 5'-(E)-Vinylphosphonate
  modified_base 2: mod_base = OTHER; note = 2'-deoxy-2'-fluorouridine-3'-phosphorothioate
  modified_base 3: mod_base = OTHER; note = 2'-O-methyluridine-3'-phosphate
  modified_base 4: mod_base = OTHER; note = 2'-O-methylcytidine-3'-phosphate
  modified_base 5: mod_base = OTHER; note = 2'-O-methylcytidine-3'-phosphate
  modified_base 6: mod_base = OTHER; note = 2'-deoxy-2'-fluorocytidine-3'-phosphate
  modified_base 7: mod_base = OTHER; note = 2'-O-methyladenosine-3'-phosphate
  modified_base 8: mod_base = OTHER; note = 2'-deoxy-2'-fluorouridine-3'-phosphate
  modified_base 9: mod_base = OTHER; note = 2'-deoxy-2'-fluoroadenosine-3'-phosphate
  modified_base 10: mod_base = OTHER; note = 2'-O-methylguanosine-3'-phosphate
  modified_base 11: mod_base = OTHER; note = 2'-O-methylguanosine-3'-phosphate
  modified_base 12: mod_base = OTHER; note = 2'-O-methyladenosine-3'-phosphate
  modified_base 13: mod_base = OTHER; note = 2'-O-methyladenosine-3'-phosphate
  modified_base 14: mod_base = OTHER; note = 2'-deoxy-2'-fluoroadenosine-3'-phosphate
  modified_base 15: mod_base = OTHER; note = 2'-O-methylcytidine-3'-phosphate
  modified_base 16: mod_base = OTHER; note = 2'-deoxy-2'-fluorouridine-3'-phosphate
  modified_base 17: mod_base = OTHER; note = 2'-O-methylcytidine-3'-phosphate
  modified_base 18: mod_base = OTHER; note = 2'-O-methyladenosine-3'-phosphate
  modified_base 19: mod_base = OTHER; note = 2'-O-methylguanosine-3'-phosphate
  modified_base 20: mod_base = OTHER; note = 2'-O-methylcytidine-3'-phosphate
  modified_base 21: mod_base = OTHER; note = 2'-O-methyluridine-3'-phosphorothioate
  modified_base 22: mod_base = OTHER; note = 2'-O-methyluridine-3'-phosphorothioate
  modified_base 23: mod_base = OTHER; note = 2'-O-methylguanosine
tttcccataggaaactcagcttg

SEQ ID NO: 1983 - RNA, 23 nt, synthetic construct
  source 1..23: mol_type = other RNA
  modified_base 1: mod_base = OTHER; note = 2'-O-methyluridine-3'-phosphorothioate 5'-(E)-Vinylphosphonate
  modified_base 2: mod_base = OTHER; note = 2'-deoxy-2'-fluoroadenosine-3'-phosphorothioate
  modified_base 3: mod_base = OTHER; note = 2'-O-methylcytidine-3'-phosphate
  modified_base 4: mod_base = OTHER; note = 2'-O-methylcytidine-3'-phosphate
  modified_base 5: mod_base = OTHER; note = 2'-O-methyladenosine-3'-phosphate
  modified_base 6: mod_base = OTHER; note = 2'-deoxy-2'-fluoroadenosine-3'-phosphate
  modified_base 7: mod_base = OTHER; note = 2'-O-methyladenosine-3'-phosphate
  modified_base 8: mod_base = OTHER; note = 2'-deoxy-2'-fluoroadenosine-3'-phosphate
  modified_base 9: mod_base = OTHER; note = 2'-deoxy-2'-fluoroadenosine-3'-phosphate
  modified_base 10: mod_base = OTHER; note = 2'-O-methylguanosine-3'-phosphate
  modified_base 11: mod_base = OTHER; note = 2'-O-methylguanosine-3'-phosphate
  modified_base 12: mod_base = OTHER; note = 2'-O-methyladenosine-3'-phosphate
  modified_base 13: mod_base = OTHER; note = 2'-O-methylcytidine-3'-phosphate
  modified_base 14: mod_base = OTHER; note = 2'-deoxy-2'-fluorocytidine-3'-phosphate
  modified_base 15: mod_base = OTHER; note = 2'-O-methyladenosine-3'-phosphate
  modified_base 16: mod_base = OTHER; note = 2'-deoxy-2'-fluoroguanosine-3'-phosphate
  modified_base 17: mod_base = OTHER; note = 2'-O-methyladenosine-3'-phosphate
  modified_base 18: mod_base = OTHER; note = 2'-O-methyladenosine-3'-phosphate
  modified_base 19: mod_base = OTHER; note = 2'-O-methylcytidine-3'-phosphate
  modified_base 20: mod_base = OTHER; note = 2'-O-methyladenosine-3'-phosphate
  modified_base 21: mod_base = OTHER; note = 2'-O-methyladenosine-3'-phosphorothioate
  modified_base 22: mod_base = OTHER; note = 2'-O-methyladenosine-3'-phosphorothioate
  modified_base 23: mod_base = OTHER; note = 2'-O-methyladenosine
taccaaaaaggaccagaacaaaa

SEQ ID NO: 1984 - RNA, 23 nt, synthetic construct
  source 1..23: mol_type = other RNA
  modified_base 1: mod_base = OTHER; note = 2'-O-methyluridine-3'-phosphorothioate 5'-(E)-Vinylphosphonate
  modified_base 2: mod_base = OTHER; note = 2'-deoxy-2'-fluoroguanosine-3'-phosphorothioate
  modified_base 3: mod_base = OTHER; note = 2'-O-methyladenosine-3'-phosphate
  modified_base 4: mod_base = OTHER; note = 2'-O-methylcytidine-3'-phosphate
  modified_base 5: mod_base = OTHER; note = 2'-O-methylcytidine-3'-phosphate
  modified_base 6: mod_base = OTHER; note = 2'-deoxy-2'-fluoroadenosine-3'-phosphate
  modified_base 7: mod_base = OTHER; note = 2'-O-methyladenosine-3'-phosphate
  modified_base 8: mod_base = OTHER; note = 2'-deoxy-2'-fluoroadenosine-3'-phosphate
  modified_base 9: mod_base = OTHER; note = 2'-deoxy-2'-fluoroadenosine-3'-phosphate
  modified_base 10: mod_base = OTHER; note = 2'-O-methyladenosine-3'-phosphate
  modified_base 11: mod_base = OTHER; note = 2'-O-methylguanosine-3'-phosphate
  modified_base 12: mod_base = OTHER; note = 2'-O-methylguanosine-3'-phosphate
  modified_base 13: mod_base = OTHER; note = 2'-O-methyladenosine-3'-phosphate
  modified_base 14: mod_base = OTHER; note = 2'-deoxy-2'-fluorocytidine-3'-phosphate
  modified_base 15: mod_base = OTHER; note = 2'-O-methylcytidine-3'-phosphate
  modified_base 16: mod_base = OTHER; note = 2'-deoxy-2'-fluoroadenosine-3'-phosphate
  modified_base 17: mod_base = OTHER; note = 2'-O-methylguanosine-3'-phosphate
  modified_base 18: mod_base = OTHER; note = 2'-O-methyladenosine-3'-phosphate
  modified_base 19: mod_base = OTHER; note = 2'-O-methyladenosine-3'-phosphate
  modified_base 20: mod_base = OTHER; note = 2'-O-methylcytidine-3'-phosphate
  modified_base 21: mod_base = OTHER; note = 2'-O-methyladenosine-3'-phosphorothioate
  modified_base 22: mod_base = OTHER; note = 2'-O-methyladenosine-3'-phosphorothioate
  modified_base 23: mod_base = OTHER; note = 2'-O-methyladenosine
tgaccaaaaaggaccagaacaaa

SEQ ID NO: 1985 - RNA, 23 nt, synthetic construct
  source 1..23: mol_type = other RNA
  modified_base 1: mod_base = OTHER; note = 2'-O-methyluridine-3'-phosphorothioate 5'-(E)-Vinylphosphonate
  modified_base 2: mod_base = OTHER; note = 2'-deoxy-2'-fluorocytidine-3'-phosphorothioate
  modified_base 3: mod_base = OTHER; note = 2'-O-methylguanosine-3'-phosphate
  modified_base 4: mod_base = OTHER; note = 2'-O-methyladenosine-3'-phosphate
  modified_base 5: mod_base = OTHER; note = 2'-O-methylcytidine-3'-phosphate
  modified_base 6: mod_base = OTHER; note = 2'-deoxy-2'-fluorocytidine-3'-phosphate
  modified_base 7: mod_base = OTHER; note = 2'-O-methyladenosine-3'-phosphate
  modified_base 8: mod_base = OTHER; note = 2'-deoxy-2'-fluoroadenosine-3'-phosphate
  modified_base 9: mod_base = OTHER; note = 2'-deoxy-2'-fluoroadenosine-3'-phosphate
  modified_base 10: mod_base = OTHER; note = 2'-O-methyladenosine-3'-phosphate
  modified_base 11: mod_base = OTHER; note = 2'-O-methyladenosine-3'-phosphate
  modified_base 12: mod_base = OTHER; note = 2'-O-methylguanosine-3'-phosphate
  modified_base 13: mod_base = OTHER; note = 2'-O-methylguanosine-3'-phosphate
  modified_base 14: mod_base = OTHER; note = 2'-deoxy-2'-fluoroadenosine-3'-phosphate
  modified_base 15: mod_base = OTHER; note = 2'-O-methylcytidine-3'-phosphate
  modified_base 16: mod_base = OTHER; note = 2'-deoxy-2'-fluorocytidine-3'-phosphate
  modified_base 17: mod_base = OTHER; note = 2'-O-methyladenosine-3'-phosphate
  modified_base 18: mod_base = OTHER; note = 2'-O-methylguanosine-3'-phosphate
  modified_base 19: mod_base = OTHER; note = 2'-O-methyladenosine-3'-phosphate
  modified_base 20: mod_base = OTHER; note = 2'-O-methyladenosine-3'-phosphate
  modified_base 21: mod_base = OTHER; note = 2'-O-methylcytidine-3'-phosphorothioate
  modified_base 22: mod_base = OTHER; note = 2'-O-methyladenosine-3'-phosphorothioate
  modified_base 23: mod_base = OTHER; note = 2'-O-methyladenosine
tcgaccaaaaaggaccagaacaa

SEQ ID NO: 1986 - RNA, 23 nt, synthetic construct
  source 1..23: mol_type = other RNA
  modified_base 1: mod_base = OTHER; note = 2'-O-methyluridine-3'-phosphorothioate 5'-(E)-Vinylphosphonate
  modified_base 2: mod_base = OTHER; note = 2'-deoxy-2'-fluorouridine-3'-phosphorothioate
  modified_base 3: mod_base = OTHER; note = 2'-O-methylcytidine-3'-phosphate
  modified_base 4: mod_base = OTHER; note = 2'-O-methylguanosine-3'-phosphate
  modified_base 5: mod_base = OTHER; note = 2'-O-methyladenosine-3'-phosphate
  modified_base 6: mod_base = OTHER; note = 2'-deoxy-2'-fluorocytidine-3'-phosphate
  modified_base 7: mod_base = OTHER; note = 2'-O-methylcytidine-3'-phosphate
  modified_base 8: mod_base = OTHER; note = 2'-deoxy-2'-fluoroadenosine-3'-phosphate
  modified_base 9: mod_base = OTHER; note = 2'-deoxy-2'-fluoroadenosine-3'-phosphate
  modified_base 10: mod_base = OTHER; note = 2'-O-methyladenosine-3'-phosphate
  modified_base 11: mod_base = OTHER; note = 2'-O-methyladenosine-3'-phosphate
  modified_base 12: mod_base = OTHER; note = 2'-O-methyladenosine-3'-phosphate
  modified_base 13: mod_base = OTHER; note = 2'-O-methylguanosine-3'-phosphate
  modified_base 14: mod_base = OTHER; note = 2'-deoxy-2'-fluoroguanosine-3'-phosphate
  modified_base 15: mod_base = OTHER; note = 2'-O-methyladenosine-3'-phosphate
  modified_base 16: mod_base = OTHER; note = 2'-deoxy-2'-fluorocytidine-3'-phosphate
  modified_base 17: mod_base = OTHER; note = 2'-O-methylcytidine-3'-phosphate
  modified_base 18: mod_base = OTHER; note = 2'-O-methyladenosine-3'-phosphate
  modified_base 19: mod_base = OTHER; note = 2'-O-methylguanosine-3'-phosphate
  modified_base 20: mod_base = OTHER; note = 2'-O-methyladenosine-3'-phosphate
  modified_base 21: mod_base = OTHER; note = 2'-O-methyladenosine-3'-phosphorothioate
  modified_base 22: mod_base = OTHER; note = 2'-O-methylcytidine-3'-phosphorothioate
  modified_base 23: mod_base = OTHER; note = 2'-O-methyladenosine
ttcgaccaaaaaggaccagaaca

SEQ ID NO: 1987 - RNA, 23 nt, synthetic construct
  source 1..23: mol_type = other RNA
  modified_base 1: mod_base = OTHER; note = 2'-O-methyluridine-3'-phosphorothioate 5'-(E)-Vinylphosphonate
  modified_base 2: mod_base = OTHER; note = 2'-deoxy-2'-fluorocytidine-3'-phosphorothioate
  modified_base 3: mod_base = OTHER; note = 2'-O-methyluridine-3'-phosphate
  modified_base 4: mod_base = OTHER; note = 2'-O-methylcytidine-3'-phosphate
  modified_base 5: mod_base = OTHER; note = 2'-O-methylguanosine-3'-phosphate
  modified_base 6: mod_base = OTHER; note = 2'-deoxy-2'-fluoroadenosine-3'-phosphate
  modified_base 7: mod_base = OTHER; note = 2'-O-methylcytidine-3'-phosphate
  modified_base 8: mod_base = OTHER; note = 2'-deoxy-2'-fluorocytidine-3'-phosphate
  modified_base 9: mod_base = OTHER; note = 2'-deoxy-2'-fluoroadenosine-3'-phosphate
  modified_base 10: mod_base = OTHER; note = 2'-O-methyladenosine-3'-phosphate
  modified_base 11: mod_base = OTHER; note = 2'-O-methyladenosine-3'-phosphate
  modified_base 12: mod_base = OTHER; note = 2'-O-methyladenosine-3'-phosphate
  modified_base 13: mod_base = OTHER; note = 2'-O-methyladenosine-3'-phosphate
  modified_base 14: mod_base = OTHER; note = 2'-deoxy-2'-fluoroguanosine-3'-phosphate
  modified_base 15: mod_base = OTHER; note = 2'-O-methylguanosine-3'-phosphate
  modified_base 16: mod_base = OTHER; note = 2'-deoxy-2'-fluoroadenosine-3'-phosphate
  modified_base 17: mod_base = OTHER; note = 2'-O-methylcytidine-3'-phosphate
  modified_base 18: mod_base = OTHER; note = 2'-O-methylcytidine-3'-phosphate
  modified_base 19: mod_base = OTHER; note = 2'-O-methyladenosine-3'-phosphate
  modified_base 20: mod_base = OTHER; note = 2'-O-methylguanosine-3'-phosphate
  modified_base 21: mod_base = OTHER; note = 2'-O-methyladenosine-3'-phosphorothioate
  modified_base 22: mod_base = OTHER; note = 2'-O-methyladenosine-3'-phosphorothioate
  modified_base 23: mod_base = OTHER; note = 2'-O-methylcytidine
tctcgaccaaaaaggaccagaac

SEQ ID NO: 1988 - RNA, 23 nt, synthetic construct
  source 1..23: mol_type = other RNA
  modified_base 1: mod_base = OTHER; note = 2'-O-methyluridine-3'-phosphorothioate 5'-(E)-Vinylphosphonate
  modified_base 2: mod_base = OTHER; note = 2'-deoxy-2'-fluorocytidine-3'-phosphorothioate
  modified_base 3: mod_base = OTHER; note = 2'-O-methylcytidine-3'-phosphate
  modified_base 4: mod_base = OTHER; note = 2'-O-methyluridine-3'-phosphate
  modified_base 5: mod_base = OTHER; note = 2'-O-methylcytidine-3'-phosphate
  modified_base 6: mod_base = OTHER; note = 2'-deoxy-2'-fluoroguanosine-3'-phosphate
  modified_base 7: mod_base = OTHER; note = 2'-O-methyladenosine-3'-phosphate
  modified_base 8: mod_base = OTHER; note = 2'-deoxy-2'-fluorocytidine-3'-phosphate
  modified_base 9: mod_base = OTHER; note = 2'-deoxy-2'-fluorocytidine-3'-phosphate
  modified_base 10: mod_base = OTHER; note = 2'-O-methyladenosine-3'-phosphate
  modified_base 11: mod_base = OTHER; note = 2'-O-methyladenosine-3'-phosphate
  modified_base 12: mod_base = OTHER; note = 2'-O-methyladenosine-3'-phosphate
  modified_base 13: mod_base = OTHER; note = 2'-O-methyladenosine-3'-phosphate
  modified_base 14: mod_base = OTHER; note = 2'-deoxy-2'-fluoroadenosine-3'-phosphate
  modified_base 15: mod_base = OTHER; note = 2'-O-methylguanosine-3'-phosphate
  modified_base 16: mod_base = OTHER; note = 2'-deoxy-2'-fluoroguanosine-3'-phosphate
  modified_base 17: mod_base = OTHER; note = 2'-O-methyladenosine-3'-phosphate
  modified_base 18: mod_base = OTHER; note = 2'-O-methylcytidine-3'-phosphate
  modified_base 19: mod_base = OTHER; note = 2'-O-methylcytidine-3'-phosphate
  modified_base 20: mod_base = OTHER; note = 2'-O-methyladenosine-3'-phosphate
  modified_base 21: mod_base = OTHER; note = 2'-O-methylguanosine-3'-phosphorothioate
  modified_base 22: mod_base = OTHER; note = 2'-O-methyladenosine-3'-phosphorothioate
  modified_base 23: mod_base = OTHER; note = 2'-O-methyladenosine
tcctcgaccaaaaaggaccagaa

SEQ ID NO: 1989 - RNA, 23 nt, synthetic construct
  source 1..23: mol_type = other RNA
  modified_base 1: mod_base = OTHER; note = 2'-O-methyluridine-3'-phosphorothioate 5'-(E)-Vinylphosphonate
  modified_base 2: mod_base = OTHER; note = 2'-deoxy-2'-fluorocytidine-3'-phosphorothioate
  modified_base 3: mod_base = OTHER; note = 2'-O-methyladenosine-3'-phosphate
  modified_base 4: mod_base = OTHER; note = 2'-O-methyluridine-3'-phosphate
  modified_base 5: mod_base = OTHER; note = 2'-O-methyluridine-3'-phosphate
  modified_base 6: mod_base = OTHER; note = 2'-deoxy-2'-fluorouridine-3'-phosphate
  modified_base 7: mod_base = OTHER; note = 2'-O-methylguanosine-3'-phosphate
  modified_base 8: mod_base = OTHER; note = 2'-deoxy-2'-fluorouridine-3'-phosphate
  modified_base 9: mod_base = OTHER; note = 2'-deoxy-2'-fluoroadenosine-3'-phosphate
  modified_base 10: mod_base = OTHER; note = 2'-O-methyluridine-3'-phosphate
  modified_base 11: mod_base = OTHER; note = 2'-O-methyluridine-3'-phosphate
  modified_base 12: mod_base = OTHER; note = 2'-O-methylguanosine-3'-phosphate
  modified_base 13: mod_base = OTHER; note = 2'-O-methyluridine-3'-phosphate
  modified_base 14: mod_base = OTHER; note = 2'-deoxy-2'-fluorouridine-3'-phosphate
  modified_base 15: mod_base = OTHER; note = 2'-O-methyladenosine-3'-phosphate
  modified_base 16: mod_base = OTHER; note = 2'-deoxy-2'-fluorocytidine-3'-phosphate
  modified_base 17: mod_base = OTHER; note = 2'-O-methyluridine-3'-phosphate
  modified_base 18: mod_base = OTHER; note = 2'-O-methylcytidine-3'-phosphate
  modified_base 19: mod_base = OTHER; note = 2'-O-methylcytidine-3'-phosphate
  modified_base 20: mod_base = OTHER; note = 2'-O-methyluridine-3'-phosphate
  modified_base 21: mod_base = OTHER; note = 2'-O-methylcytidine-3'-phosphorothioate
  modified_base 22: mod_base = OTHER; note = 2'-O-methylguanosine-3'-phosphorothioate
  modified_base 23: mod_base = OTHER; note = 2'-O-methyladenosine
tcatttgtattgttactcctcga

SEQ ID NO: 1990 - RNA, 23 nt, synthetic construct
  source 1..23: mol_type = other RNA
  modified_base 1: mod_base = OTHER; note = 2'-O-methyluridine-3'-phosphorothioate 5'-(E)-Vinylphosphonate
  modified_base 2: mod_base = OTHER; note = 2'-deoxy-2'-fluoroguanosine-3'-phosphorothioate
  modified_base 3: mod_base = OTHER; note = 2'-O-methyladenosine-3'-phosphate
  modified_base 4: mod_base = OTHER; note = 2'-O-methyladenosine-3'-phosphate
  modified_base 5: mod_base = OTHER; note = 2'-O-methyluridine-3'-phosphate
  modified_base 6: mod_base = OTHER; note = 2'-deoxy-2'-fluorouridine-3'-phosphate
  modified_base 7: mod_base = OTHER; note = 2'-O-methyladenosine-3'-phosphate
  modified_base 8: mod_base = OTHER; note = 2'-deoxy-2'-fluoroguanosine-3'-phosphate
  modified_base 9: mod_base = OTHER; note = 2'-deoxy-2'-fluorouridine-3'-phosphate
  modified_base 10: mod_base = OTHER; note = 2'-O-methylguanosine-3'-phosphate
  modified_base 11: mod_base = OTHER; note = 2'-O-methyluridine-3'-phosphate
  modified_base 12: mod_base = OTHER; note = 2'-O-methyluridine-3'-phosphate
  modified_base 13: mod_base = OTHER; note = 2'-O-methylcytidine-3'-phosphate
  modified_base 14: mod_base = OTHER; note = 2'-deoxy-2'-fluorouridine-3'-phosphate
  modified_base 15: mod_base = OTHER; note = 2'-O-methyladenosine-3'-phosphate
  modified_base 16: mod_base = OTHER; note = 2'-deoxy-2'-fluorocytidine-3'-phosphate
  modified_base 17: mod_base = OTHER; note = 2'-O-methyladenosine-3'-phosphate
  modified_base 18: mod_base = OTHER; note = 2'-O-methylcytidine-3'-phosphate
  modified_base 19: mod_base = OTHER; note = 2'-O-methylcytidine-3'-phosphate
  modified_base 20: mod_base = OTHER; note = 2'-O-methyladenosine-3'-phosphate
  modified_base 21: mod_base = OTHER; note = 2'-O-methyluridine-3'-phosphorothioate
  modified_base 22: mod_base = OTHER; note = 2'-O-methyluridine-3'-phosphorothioate
  modified_base 23: mod_base = OTHER; note = 2'-O-methyladenosine
tgaattagtgttctacaccatta

SEQ ID NO: 1991 - RNA, 23 nt, synthetic construct
  source 1..23: mol_type = other RNA
  modified_base 1: mod_base = OTHER; note = 2'-O-methyluridine-3'-phosphorothioate 5'-(E)-Vinylphosphonate
  modified_base 2: mod_base = OTHER; note = 2'-deoxy-2'-fluoroadenosine-3'-phosphorothioate
  modified_base 3: mod_base = OTHER; note = 2'-O-methyluridine-3'-phosphate
  modified_base 4: mod_base = OTHER; note = 2'-O-methylguanosine-3'-phosphate
  modified_base 5: mod_base = OTHER; note = 2'-O-methyladenosine-3'-phosphate
  modified_base 6: mod_base = OTHER; note = 2'-deoxy-2'-fluoroadenosine-3'-phosphate
  modified_base 7: mod_base = OTHER; note = 2'-O-methyluridine-3'-phosphate
  modified_base 8: mod_base = OTHER; note = 2'-deoxy-2'-fluorouridine-3'-phosphate
  modified_base 9: mod_base = OTHER; note = 2'-deoxy-2'-fluoroadenosine-3'-phosphate
  modified_base 10: mod_base = OTHER; note = 2'-O-methylguanosine-3'-phosphate
  modified_base 11: mod_base = OTHER; note = 2'-O-methyluridine-3'-phosphate
  modified_base 12: mod_base = OTHER; note = 2'-O-methylguanosine-3'-phosphate
  modified_base 13: mod_base = OTHER; note = 2'-O-methyluridine-3'-phosphate
  modified_base 14: mod_base = OTHER; note = 2'-deoxy-2'-fluorouridine-3'-phosphate
  modified_base 15: mod_base = OTHER; note = 2'-O-methylcytidine-3'-phosphate
  modified_base 16: mod_base = OTHER; note = 2'-deoxy-2'-fluorouridine-3'-phosphate
  modified_base 17: mod_base = OTHER; note = 2'-O-methyladenosine-3'-phosphate
  modified_base 18: mod_base = OTHER; note = 2'-O-methylcytidine-3'-phosphate
  modified_base 19: mod_base = OTHER; note = 2'-O-methyladenosine-3'-phosphate
  modified_base 20: mod_base = OTHER; note = 2'-O-methylcytidine-3'-phosphate
  modified_base 21: mod_base = OTHER; note = 2'-O-methylcytidine-3'-phosphorothioate
  modified_base 22: mod_base = OTHER; note = 2'-O-methyladenosine-3'-phosphorothioate
  modified_base 23: mod_base = OTHER; note = 2'-O-methyluridine
tatgaattagtgttctacaccat

SEQ ID NO: 1992 - RNA, 23 nt, synthetic construct
  source 1..23: mol_type = other RNA
  modified_base 1: mod_base = OTHER; note = 2'-O-methyluridine-3'-phosphorothioate 5'-(E)-Vinylphosphonate
  modified_base 2: mod_base = OTHER; note = 2'-deoxy-2'-fluorouridine-3'-phosphorothioate
  modified_base 3: mod_base = OTHER; note = 2'-O-methyladenosine-3'-phosphate
  modified_base 4: mod_base = OTHER; note = 2'-O-methyluridine-3'-phosphate
  modified_base 5: mod_base = OTHER; note = 2'-O-methylguanosine-3'-phosphate
  modified_base 6: mod_base = OTHER; note = 2'-deoxy-2'-fluoroadenosine-3'-phosphate
  modified_base 7: mod_base = OTHER; note = 2'-O-methyladenosine-3'-phosphate
  modified_base 8: mod_base = OTHER; note = 2'-deoxy-2'-fluorouridine-3'-phosphate
  modified_base 9: mod_base = OTHER; note = 2'-deoxy-2'-fluorouridine-3'-phosphate
  modified_base 10: mod_base = OTHER; note = 2'-O-methyladenosine-3'-phosphate
  modified_base 11: mod_base = OTHER; note = 2'-O-methylguanosine-3'-phosphate
  modified_base 12: mod_base = OTHER; note = 2'-O-methyluridine-3'-phosphate
  modified_base 13: mod_base = OTHER; note = 2'-O-methylguanosine-3'-phosphate
  modified_base 14: mod_base = OTHER; note = 2'-deoxy-2'-fluorouridine-3'-phosphate
  modified_base 15: mod_base = OTHER; note = 2'-O-methyluridine-3'-phosphate
  modified_base 16: mod_base = OTHER; note = 2'-deoxy-2'-fluorocytidine-3'-phosphate
  modified_base 17: mod_base = OTHER; note = 2'-O-methyluridine-3'-phosphate
  modified_base 18: mod_base = OTHER; note = 2'-O-methyladenosine-3'-phosphate
  modified_base 19: mod_base = OTHER; note = 2'-O-methylcytidine-3'-phosphate
  modified_base 20: mod_base = OTHER; note = 2'-O-methyladenosine-3'-phosphate
  modified_base 21: mod_base = OTHER; note = 2'-O-methylcytidine-3'-phosphorothioate
  modified_base 22: mod_base = OTHER; note = 2'-O-methylcytidine-3'-phosphorothioate
  modified_base 23: mod_base = OTHER; note = 2'-O-methyladenosine
ttatgaattagtgttctacacca

SEQ ID NO: 1993 - RNA, 23 nt, synthetic construct
  source 1..23: mol_type = other RNA
  modified_base 1: mod_base = OTHER; note = 2'-O-methyluridine-3'-phosphorothioate 5'-(E)-Vinylphosphonate
  modified_base 2: mod_base = OTHER; note = 2'-deoxy-2'-fluoroguanosine-3'-phosphorothioate
  modified_base 3: mod_base = OTHER; note = 2'-O-methyladenosine-3'-phosphate
  modified_base 4: mod_base = OTHER; note = 2'-O-methyluridine-3'-phosphate
  modified_base 5: mod_base = OTHER; note = 2'-O-methyluridine-3'-phosphate
  modified_base 6: mod_base = OTHER; note = 2'-deoxy-2'-fluoroadenosine-3'-phosphate
  modified_base 7: mod_base = OTHER; note = 2'-O-methyluridine-3'-phosphate
  modified_base 8: mod_base = OTHER; note = 2'-deoxy-2'-fluoroguanosine-3'-phosphate
  modified_base 9: mod_base = OTHER; note = 2'-deoxy-2'-fluoroadenosine-3'-phosphate
  modified_base 10: mod_base = OTHER; note = 2'-O-methyladenosine-3'-phosphate
  modified_base 11: mod_base = OTHER; note = 2'-O-methyluridine-3'-phosphate
  modified_base 12: mod_base = OTHER; note = 2'-O-methyluridine-3'-phosphate
  modified_base 13: mod_base = OTHER; note = 2'-O-methyladenosine-3'-phosphate
  modified_base 14: mod_base = OTHER; note = 2'-deoxy-2'-fluoroguanosine-3'-phosphate
  modified_base 15: mod_base = OTHER; note = 2'-O-methyluridine-3'-phosphate
  modified_base 16: mod_base = OTHER; note = 2'-deoxy-2'-fluoroguanosine-3'-phosphate
  modified_base 17: mod_base = OTHER; note = 2'-O-methyluridine-3'-phosphate
  modified_base 18: mod_base = OTHER; note = 2'-O-methyluridine-3'-phosphate
  modified_base 19: mod_base = OTHER; note = 2'-O-methylcytidine-3'-phosphate
  modified_base 20: mod_base = OTHER; note = 2'-O-methyluridine-3'-phosphate
  modified_base 21: mod_base = OTHER; note = 2'-O-methyladenosine-3'-phosphorothioate
  modified_base 22: mod_base = OTHER; note = 2'-O-methylcytidine-3'-phosphorothioate
  modified_base 23: mod_base = OTHER; note = 2'-O-methyladenosine
tgattatgaattagtgttctaca

SEQ ID NO: 1994 - RNA, 23 nt, synthetic construct
  source 1..23: mol_type = other RNA
  modified_base 1: mod_base = OTHER; note = 2'-O-methyluridine-3'-phosphorothioate 5'-(E)-Vinylphosphonate
  modified_base 2: mod_base = OTHER; note = 2'-deoxy-2'-fluoroguanosine-3'-phosphorothioate
  modified_base 3: mod_base = OTHER; note = 2'-O-methyluridine-3'-phosphate
  modified_base 4: mod_base = OTHER; note = 2'-O-methylguanosine-3'-phosphate
  modified_base 5: mod_base = OTHER; note = 2'-O-methyladenosine-3'-phosphate
  modified_base 6: mod_base = OTHER; note = 2'-deoxy-2'-fluorouridine-3'-phosphate
  modified_base 7: mod_base = OTHER; note = 2'-O-methyluridine-3'-phosphate
  modified_base 8: mod_base = OTHER; note = 2'-deoxy-2'-fluoroadenosine-3'-phosphate
  modified_base 9: mod_base = OTHER; note = 2'-deoxy-2'-fluorouridine-3'-phosphate
  modified_base 10: mod_base = OTHER; note = 2'-O-methylguanosine-3'-phosphate
  modified_base 11: mod_base = OTHER; note = 2'-O-methyladenosine-3'-phosphate
  modified_base 12: mod_base = OTHER; note = 2'-O-methyladenosine-3'-phosphate
  modified_base 13: mod_base = OTHER; note = 2'-O-methyluridine-3'-phosphate
  modified_base 14: mod_base = OTHER; note = 2'-deoxy-2'-fluorouridine-3'-phosphate
  modified_base 15: mod_base = OTHER; note = 2'-O-methyladenosine-3'-phosphate
  modified_base 16: mod_base = OTHER; note = 2'-deoxy-2'-fluoroguanosine-3'-phosphate
  modified_base 17: mod_base = OTHER; note = 2'-O-methyluridine-3'-phosphate
  modified_base 18: mod_base = OTHER; note = 2'-O-methylguanosine-3'-phosphate
  modified_base 19: mod_base = OTHER; note = 2'-O-methyluridine-3'-phosphate
  modified_base 20: mod_base = OTHER; note = 2'-O-methyluridine-3'-phosphate
  modified_base 21: mod_base = OTHER; note = 2'-O-methylcytidine-3'-phosphorothioate
  modified_base 22: mod_base = OTHER; note = 2'-O-methyluridine-3'-phosphorothioate
  modified_base 23: mod_base = OTHER; note = 2'-O-methyladenosine
tgtgattatgaattagtgttcta

SEQ ID NO: 1995 - RNA, 23 nt, synthetic construct
  source 1..23: mol_type = other RNA
  modified_base 1: mod_base = OTHER; note = 2'-O-methyluridine-3'-phosphorothioate 5'-(E)-Vinylphosphonate
  modified_base 2: mod_base = OTHER; note = 2'-deoxy-2'-fluorocytidine-3'-phosphorothioate
  modified_base 3: mod_base = OTHER; note = 2'-O-methylcytidine-3'-phosphate
  modified_base 4: mod_base = OTHER; note = 2'-O-methyladenosine-3'-phosphate
  modified_base 5: mod_base = OTHER; note = 2'-O-methylcytidine-3'-phosphate
  modified_base 6: mod_base = OTHER; note = 2'-deoxy-2'-fluorocytidine-3'-phosphate
  modified_base 7: mod_base = OTHER; note = 2'-O-methyluridine-3'-phosphate
  modified_base 8: mod_base = OTHER; note = 2'-deoxy-2'-fluoroguanosine-3'-phosphate
  modified_base 9: mod_base = OTHER; note = 2'-deoxy-2'-fluorocytidine-3'-phosphate
  modified_base 10: mod_base = OTHER; note = 2'-O-methyluridine-3'-phosphate
  modified_base 11: mod_base = OTHER; note = 2'-O-methyluridine-3'-phosphate
  modified_base 12: mod_base = OTHER; note = 2'-O-methyladenosine-3'-phosphate
  modified_base 13: mod_base = OTHER; note = 2'-O-methyluridine-3'-phosphate
  modified_base 14: mod_base = OTHER; note = 2'-deoxy-2'-fluorouridine-3'-phosphate
  modified_base 15: mod_base = OTHER; note = 2'-O-methyluridine-3'-phosphate
  modified_base 16: mod_base = OTHER; note = 2'-deoxy-2'-fluorouridine-3'-phosphate
  modified_base 17: mod_base = OTHER; note = 2'-O-methyladenosine-3'-phosphate
  modified_base 18: mod_base = OTHER; note = 2'-O-methyladenosine-3'-phosphate
  modified_base 19: mod_base = OTHER; note = 2'-O-methylguanosine-3'-phosphate
  modified_base 20: mod_base = OTHER; note = 2'-O-methylcytidine-3'-phosphate
  modified_base 21: mod_base = OTHER; note = 2'-O-methyladenosine-3'-phosphorothioate
  modified_base 22: mod_base = OTHER; note = 2'-O-methyluridine-3'-phosphorothioate
  modified_base 23: mod_base = OTHER; note = 2'-O-methyladenosine
tccacctgcttattttaagcata

SEQ ID NO: 1996 - RNA, 23 nt, synthetic construct
  source 1..23: mol_type = other RNA
  modified_base 1: mod_base = OTHER; note = 2'-O-methyluridine-3'-phosphorothioate 5'-(E)-Vinylphosphonate
  modified_base 2: mod_base = OTHER; note = 2'-deoxy-2'-fluoroguanosine-3'-phosphorothioate
  modified_base 3: mod_base = OTHER; note = 2'-O-methyladenosine-3'-phosphate
  modified_base 4: mod_base = OTHER; note = 2'-O-methyladenosine-3'-phosphate
  modified_base 5: mod_base = OTHER; note = 2'-O-methyladenosine-3'-phosphate
  modified_base 6: mod_base = OTHER; note = 2'-deoxy-2'-fluorouridine-3'-phosphate
  modified_base 7: mod_base = OTHER; note = 2'-O-methyladenosine-3'-phosphate
  modified_base 8: mod_base = OTHER; note = 2'-deoxy-2'-fluoroguanosine-3'-phosphate
  modified_base 9: mod_base = OTHER; note = 2'-deoxy-2'-fluoroadenosine-3'-phosphate
  modified_base 10: mod_base = OTHER; note = 2'-O-methyluridine-3'-phosphate
  modified_base 11: mod_base = OTHER; note = 2'-O-methylcytidine-3'-phosphate
  modified_base 12: mod_base = OTHER; note = 2'-O-methylcytidine-3'-phosphate
  modified_base 13: mod_base = OTHER; note = 2'-O-methyladenosine-3'-phosphate
  modified_base 14: mod_base = OTHER; note = 2'-deoxy-2'-fluorocytidine-3'-phosphate
  modified_base 15: mod_base = OTHER; note = 2'-O-methylcytidine-3'-phosphate
  modified_base 16: mod_base = OTHER; note = 2'-deoxy-2'-fluorouridine-3'-phosphate
  modified_base 17: mod_base = OTHER; note = 2'-O-methylguanosine-3'-phosphate
  modified_base 18: mod_base = OTHER; note = 2'-O-methylcytidine-3'-phosphate
  modified_base 19: mod_base = OTHER; note = 2'-O-methyluridine-3'-phosphate
  modified_base 20: mod_base = OTHER; note = 2'-O-methyluridine-3'-phosphate
  modified_base 21: mod_base = OTHER; note = 2'-O-methyladenosine-3'-phosphorothioate
  modified_base 22: mod_base = OTHER; note = 2'-O-methyluridine-3'-phosphorothioate
  modified_base 23: mod_base = OTHER; note = 2'-O-methyluridine
tgaaatagatccacctgcttatt

SEQ ID NO: 1997 - RNA, 23 nt, synthetic construct
  source 1..23: mol_type = other RNA
  modified_base 1: mod_base = OTHER; note = 2'-O-methyluridine-3'-phosphorothioate 5'-(E)-Vinylphosphonate
  modified_base 2: mod_base = OTHER; note = 2'-deoxy-2'-fluoroadenosine-3'-phosphorothioate
  modified_base 3: mod_base = OTHER; note = 2'-O-methyluridine-3'-phosphate
  modified_base 4: mod_base = OTHER; note = 2'-O-methylguanosine-3'-phosphate
  modified_base 5: mod_base = OTHER; note = 2'-O-methyladenosine-3'-phosphate
  modified_base 6: mod_base = OTHER; note = 2'-deoxy-2'-fluoroadenosine-3'-phosphate
  modified_base 7: mod_base = OTHER; note = 2'-O-methyladenosine-3'-phosphate
  modified_base 8: mod_base = OTHER; note = 2'-deoxy-2'-fluorouridine-3'-phosphate
  modified_base 9: mod_base = OTHER; note = 2'-deoxy-2'-fluoroadenosine-3'-phosphate
  modified_base 10: mod_base = OTHER; note = 2'-O-methylguanosine-3'-phosphate
  modified_base 11: mod_base = OTHER; note = 2'-O-methyladenosine-3'-phosphate
  modified_base 12: mod_base = OTHER; note = 2'-O-methyluridine-3'-phosphate
  modified_base 13: mod_base = OTHER; note = 2'-O-methylcytidine-3'-phosphate
  modified_base 14: mod_base = OTHER; note = 2'-deoxy-2'-fluorocytidine-3'-phosphate
  modified_base 15: mod_base = OTHER; note = 2'-O-methyladenosine-3'-phosphate
  modified_base 16: mod_base = OTHER; note = 2'-deoxy-2'-fluorocytidine-3'-phosphate
  modified_base 17: mod_base = OTHER; note = 2'-O-methylcytidine-3'-phosphate
  modified_base 18: mod_base = OTHER; note = 2'-O-methyluridine-3'-phosphate
  modified_base 19: mod_base = OTHER; note = 2'-O-methylguanosine-3'-phosphate
  modified_base 20: mod_base = OTHER; note = 2'-O-methylcytidine-3'-phosphate
  modified_base 21: mod_base = OTHER; note = 2'-O-methyluridine-3'-phosphorothioate
  modified_base 22: mod_base = OTHER; note = 2'-O-methyluridine-3'-phosphorothioate
  modified_base 23: mod_base = OTHER; note = 2'-O-methyladenosine
tatgaaatagatccacctgctta

SEQ ID NO: 1998 - RNA, 23 nt, synthetic construct
  source 1..23: mol_type = other RNA
  modified_base 1: mod_base = OTHER; note = 2'-O-methyluridine-3'-phosphorothioate 5'-(E)-Vinylphosphonate
  modified_base 2: mod_base = OTHER; note = 2'-deoxy-2'-fluorocytidine-3'-phosphorothioate
  modified_base 3: mod_base = OTHER; note = 2'-O-methyladenosine-3'-phosphate
  modified_base 4: mod_base = OTHER; note = 2'-O-methyluridine-3'-phosphate
  modified_base 5: mod_base = OTHER; note = 2'-O-methylguanosine-3'-phosphate
  modified_base 6: mod_base = OTHER; note = 2'-deoxy-2'-fluoroadenosine-3'-phosphate
  modified_base 7: mod_base = OTHER; note = 2'-O-methyladenosine-3'-phosphate
  modified_base 8: mod_base = OTHER; note = 2'-deoxy-2'-fluoroadenosine-3'-phosphate
  modified_base 9: mod_base = OTHER; note = 2'-deoxy-2'-fluorouridine-3'-phosphate
  modified_base 10: mod_base = OTHER; note = 2'-O-methyladenosine-3'-phosphate
  modified_base 11: mod_base = OTHER; note = 2'-O-methylguanosine-3'-phosphate
  modified_base 12: mod_base = OTHER; note = 2'-O-methyladenosine-3'-phosphate
  modified_base 13: mod_base = OTHER; note = 2'-O-methyluridine-3'-phosphate
  modified_base 14: mod_base = OTHER; note = 2'-deoxy-2'-fluorocytidine-3'-phosphate
  modified_base 15: mod_base = OTHER; note = 2'-O-methylcytidine-3'-phosphate
  modified_base 16: mod_base = OTHER; note = 2'-deoxy-2'-fluoroadenosine-3'-phosphate
  modified_base 17: mod_base = OTHER; note = 2'-O-methylcytidine-3'-phosphate
  modified_base 18: mod_base = OTHER; note = 2'-O-methylcytidine-3'-phosphate
  modified_base 19: mod_base = OTHER; note = 2'-O-methyluridine-3'-phosphate
  modified_base 20: mod_base = OTHER; note = 2'-O-methylguanosine-3'-phosphate
  modified_base 21: mod_base = OTHER; note = 2'-O-methylcytidine-3'-phosphorothioate
  modified_base 22: mod_base = OTHER; note = 2'-O-methyluridine-3'-phosphorothioate
  modified_base 23: mod_base = OTHER; note = 2'-O-methyluridine
tcatgaaatagatccacctgctt

SEQ ID NO: 1999 - RNA, 23 nt, synthetic construct
  source 1..23: mol_type = other RNA
  modified_base 1: mod_base = OTHER; note = 2'-O-methyluridine-3'-phosphorothioate 5'-(E)-Vinylphosphonate
  modified_base 2: mod_base = OTHER; note = 2'-deoxy-2'-fluoroadenosine-3'-phosphorothioate
  modified_base 3: mod_base = OTHER; note = 2'-O-methyladenosine-3'-phosphate
  modified_base 4: mod_base = OTHER; note = 2'-O-methyladenosine-3'-phosphate
  modified_base 5: mod_base = OTHER; note = 2'-O-methylcytidine-3'-phosphate
  modified_base 6: mod_base = OTHER; note = 2'-deoxy-2'-fluoroadenosine-3'-phosphate
  modified_base 7: mod_base = OTHER; note = 2'-O-methyluridine-3'-phosphate
  modified_base 8: mod_base = OTHER; note = 2'-deoxy-2'-fluoroguanosine-3'-phosphate
  modified_base 9: mod_base = OTHER; note = 2'-deoxy-2'-fluoroadenosine-3'-phosphate
  modified_base 10: mod_base = OTHER; note = 2'-O-methyladenosine-3'-phosphate
  modified_base 11: mod_base = OTHER; note = 2'-O-methyladenosine-3'-phosphate
  modified_base 12: mod_base = OTHER; note = 2'-O-methyluridine-3'-phosphate
  modified_base 13: mod_base = OTHER; note = 2'-O-methyladenosine-3'-phosphate
  modified_base 14: mod_base = OTHER; note = 2'-deoxy-2'-fluoroguanosine-3'-phosphate
  modified_base 15: mod_base = OTHER; note = 2'-O-methyladenosine-3'-phosphate
  modified_base 16: mod_base = OTHER; note = 2'-deoxy-2'-fluorouridine-3'-phosphate
  modified_base 17: mod_base = OTHER; note = 2'-O-methylcytidine-3'-phosphate
  modified_base 18: mod_base = OTHER; note = 2'-O-methylcytidine-3'-phosphate
  modified_base 19: mod_base = OTHER; note = 2'-O-methyladenosine-3'-phosphate
  modified_base 20: mod_base = OTHER; note = 2'-O-methylcytidine-3'-phosphate
  modified_base 21: mod_base = OTHER; note = 2'-O-methylcytidine-3'-phosphorothioate
  modified_base 22: mod_base = OTHER; note = 2'-O-methyluridine-3'-phosphorothioate
  modified_base 23: mod_base = OTHER; note = 2'-O-methylguanosine
taaacatgaaatagatccacctg

SEQ ID NO: 2000 - RNA, 23 nt, synthetic construct
  source 1..23: mol_type = other RNA
  modified_base 1: mod_base = OTHER; note = 2'-O-methyluridine-3'-phosphorothioate 5'-(E)-Vinylphosphonate
  modified_base 2: mod_base = OTHER; note = 2'-deoxy-2'-fluoroadenosine-3'-phosphorothioate
  modified_base 3: mod_base = OTHER; note = 2'-O-methyladenosine-3'-phosphate
  modified_base 4: mod_base = OTHER; note = 2'-O-methyladenosine-3'-phosphate
  modified_base 5: mod_base = OTHER; note = 2'-O-methyladenosine-3'-phosphate
  modified_base 6: mod_base = OTHER; note = 2'-deoxy-2'-fluorocytidine-3'-phosphate
  modified_base 7: mod_base = OTHER; note = 2'-O-methyladenosine-3'-phosphate
  modified_base 8: mod_base = OTHER; note = 2'-deoxy-2'-fluorouridine-3'-phosphate
  modified_base 9: mod_base = OTHER; note = 2'-deoxy-2'-fluoroguanosine-3'-phosphate
  modified_base 10: mod_base = OTHER; note = 2'-O-methyladenosine-3'-phosphate
  modified_base 11: mod_base = OTHER; note = 2'-O-methyladenosine-3'-phosphate
  modified_base 12: mod_base = OTHER; note = 2'-O-methyladenosine-3'-phosphate
  modified_base 13: mod_base = OTHER; note = 2'-O-methyluridine-3'-phosphate
  modified_base 14: mod_base = OTHER; note = 2'-deoxy-2'-fluoroadenosine-3'-phosphate
  modified_base 15: mod_base = OTHER; note = 2'-O-methylguanosine-3'-phosphate
  modified_base 16: mod_base = OTHER; note = 2'-deoxy-2'-fluoroadenosine-3'-phosphate
  modified_base 17: mod_base = OTHER; note = 2'-O-methyluridine-3'-phosphate
  modified_base 18: mod_base = OTHER; note = 2'-O-methylcytidine-3'-phosphate
  modified_base 19: mod_base = OTHER; note = 2'-O-methylcytidine-3'-phosphate
  modified_base 20: mod_base = OTHER; note = 2'-O-methyladenosine-3'-phosphate
  modified_base 21: mod_base = OTHER; note = 2'-O-methylcytidine-3'-phosphorothioate
  modified_base 22: mod_base = OTHER; note = 2'-O-methylcytidine-3'-phosphorothioate
  modified_base 23: mod_base = OTHER; note = 2'-O-methyluridine
taaaacatgaaatagatccacct

SEQ ID NO: 2001 - RNA, 23 nt, synthetic construct
  source 1..23: mol_type = other RNA
  modified_base 1: mod_base = OTHER; note = 2'-O-methyluridine-3'-phosphorothioate 5'-(E)-Vinylphosphonate
  modified_base 2: mod_base = OTHER; note = 2'-deoxy-2'-fluorocytidine-3'-phosphorothioate
  modified_base 3: mod_base = OTHER; note = 2'-O-methyladenosine-3'-phosphate
  modified_base 4: mod_base = OTHER; note = 2'-O-methyladenosine-3'-phosphate
  modified_base 5: mod_base = OTHER; note = 2'-O-methyladenosine-3'-phosphate
  modified_base 6: mod_base = OTHER; note = 2'-deoxy-2'-fluoroadenosine-3'-phosphate
  modified_base 7: mod_base = OTHER; note = 2'-O-methyladenosine-3'-phosphate
  modified_base 8: mod_base = OTHER; note = 2'-deoxy-2'-fluorocytidine-3'-phosphate
  modified_base 9: mod_base = OTHER; note = 2'-deoxy-2'-fluoroadenosine-3'-phosphate
  modified_base 10: mod_base = OTHER; note = 2'-O-methyluridine-3'-phosphate
  modified_base 11: mod_base = OTHER; note = 2'-O-methylguanosine-3'-phosphate
  modified_base 12: mod_base = OTHER; note = 2'-O-methyladenosine-3'-phosphate
  modified_base 13: mod_base = OTHER; note = 2'-O-methyladenosine-3'-phosphate
  modified_base 14: mod_base = OTHER; note = 2'-deoxy-2'-fluoroadenosine-3'-phosphate
  modified_base 15: mod_base = OTHER; note = 2'-O-methyluridine-3'-phosphate
  modified_base 16: mod_base = OTHER; note = 2'-deoxy-2'-fluoroadenosine-3'-phosphate
  modified_base 17: mod_base = OTHER; note = 2'-O-methylguanosine-3'-phosphate
  modified_base 18: mod_base = OTHER; note = 2'-O-methyladenosine-3'-phosphate
  modified_base 19: mod_base = OTHER; note = 2'-O-methyluridine-3'-phosphate
  modified_base 20: mod_base = OTHER; note = 2'-O-methylcytidine-3'-phosphate
  modified_base 21: mod_base = OTHER; note = 2'-O-methylcytidine-3'-phosphorothioate
  modified_base 22: mod_base = OTHER; note = 2'-O-methyladenosine-3'-phosphorothioate
  modified_base 23: mod_base = OTHER; note = 2'-O-methylcytidine
tcaaaaacatgaaatagatccac

SEQ ID NO: 2002 - RNA, 23 nt, synthetic construct
  source 1..23: mol_type = other RNA
  modified_base 1: mod_base = OTHER; note = 2'-O-methyluridine-3'-phosphorothioate 5'-(E)-Vinylphosphonate
  modified_base 2: mod_base = OTHER; note = 2'-deoxy-2'-fluorocytidine-3'-phosphorothioate
  modified_base 3: mod_base = OTHER; note = 2'-O-methyluridine-3'-phosphate
  modified_base 4: mod_base = OTHER; note = 2'-O-methyluridine-3'-phosphate
  modified_base 5: mod_base = OTHER; note = 2'-O-methyladenosine-3'-phosphate
  modified_base 6: mod_base = OTHER; note = 2'-deoxy-2'-fluorocytidine-3'-phosphate
  modified_base 7: mod_base = OTHER; note = 2'-O-methyluridine-3'-phosphate
  modified_base 8: mod_base = OTHER; note = 2'-deoxy-2'-fluoroguanosine-3'-phosphate
  modified_base 9: mod_base = OTHER; note = 2'-deoxy-2'-fluoroadenosine-3'-phosphate
  modified_base 10: mod_base = OTHER; note = 2'-O-methyluridine-3'-phosphate
  modified_base 11: mod_base = OTHER; note = 2'-O-methyluridine-3'-phosphate
  modified_base 12: mod_base = OTHER; note = 2'-O-methyluridine-3'-phosphate
  modified_base 13: mod_base = OTHER; note = 2'-O-methyladenosine-3'-phosphate
  modified_base 14: mod_base = OTHER; note = 2'-deoxy-2'-fluorocytidine-3'-phosphate
  modified_base 15: mod_base = OTHER; note = 2'-O-methylcytidine-3'-phosphate
  modified_base 16: mod_base = OTHER; note = 2'-deoxy-2'-fluorocytidine-3'-phosphate
  modified_base 17: mod_base = OTHER; note = 2'-O-methyluridine-3'-phosphate
  modified_base 18: mod_base = OTHER; note = 2'-O-methyladenosine-3'-phosphate
  modified_base 19: mod_base = OTHER; note = 2'-O-methylcytidine-3'-phosphate
  modified_base 20: mod_base = OTHER; note = 2'-O-methylcytidine-3'-phosphate
  modified_base 21: mod_base = OTHER; note = 2'-O-methylcytidine-3'-phosphorothioate
  modified_base 22: mod_base = OTHER; note = 2'-O-methyladenosine-3'-phosphorothioate
  modified_base 23: mod_base = OTHER; note = 2'-O-methyluridine
tcttactgatttaccctacccat

SEQ ID NO: 2003 - RNA, 23 nt, synthetic construct
  source 1..23: mol_type = other RNA
  modified_base 1: mod_base = OTHER; note = 2'-O-methyluridine-3'-phosphorothioate 5'-(E)-Vinylphosphonate
  modified_base 2: mod_base = OTHER; note = 2'-deoxy-2'-fluorocytidine-3'-phosphorothioate
  modified_base 3: mod_base = OTHER; note = 2'-O-methyluridine-3'-phosphate
  modified_base 4: mod_base = OTHER; note = 2'-O-methylcytidine-3'-phosphate
  modified_base 5: mod_base = OTHER; note = 2'-O-methyluridine-3'-phosphate
  modified_base 6: mod_base = OTHER; note = 2'-deoxy-2'-fluorouridine-3'-phosphate
  modified_base 7: mod_base = OTHER; note = 2'-O-methyladenosine-3'-phosphate
  modified_base 8: mod_base = OTHER; note = 2'-deoxy-2'-fluorocytidine-3'-phosphate
  modified_base 9: mod_base = OTHER; note = 2'-deoxy-2'-fluorouridine-3'-phosphate
  modified_base 10: mod_base = OTHER; note = 2'-O-methylguanosine-3'-phosphate
  modified_base 11: mod_base = OTHER; note = 2'-O-methyladenosine-3'-phosphate
  modified_base 12: mod_base = OTHER; note = 2'-O-methyluridine-3'-phosphate
  modified_base 13: mod_base = OTHER; note = 2'-O-methyluridine-3'-phosphate
  modified_base 14: mod_base = OTHER; note = 2'-deoxy-2'-fluorouridine-3'-phosphate
  modified_base 15: mod_base = OTHER; note = 2'-O-methyladenosine-3'-phosphate
  modified_base 16: mod_base = OTHER; note = 2'-deoxy-2'-fluorocytidine-3'-phosphate
  modified_base 17: mod_base = OTHER; note = 2'-O-methylcytidine-3'-phosphate
  modified_base 18: mod_base = OTHER; note = 2'-O-methylcytidine-3'-phosphate
  modified_base 19: mod_base = OTHER; note = 2'-O-methyluridine-3'-phosphate
  modified_base 20: mod_base = OTHER; note = 2'-O-methyladenosine-3'-phosphate
  modified_base 21: mod_base = OTHER; note = 2'-O-methylcytidine-3'-phosphorothioate
  modified_base 22: mod_base = OTHER; note = 2'-O-methylcytidine-3'-phosphorothioate
  modified_base 23: mod_base = OTHER; note = 2'-O-methylcytidine
tctcttactgatttaccctaccc

SEQ ID NO: 2004 - RNA, 23 nt, synthetic construct
  source 1..23: mol_type = other RNA
  modified_base 1: mod_base = OTHER; note = 2'-O-methyluridine-3'-phosphorothioate 5'-(E)-Vinylphosphonate
  modified_base 2: mod_base = OTHER; note = 2'-deoxy-2'-fluorocytidine-3'-phosphorothioate
  modified_base 3: mod_base = OTHER; note = 2'-O-methylcytidine-3'-phosphate
  modified_base 4: mod_base = OTHER; note = 2'-O-methyluridine-3'-phosphate
  modified_base 5: mod_base = OTHER; note = 2'-O-methylcytidine-3'-phosphate
  modified_base 6: mod_base = OTHER; note = 2'-deoxy-2'-fluorouridine-3'-phosphate
  modified_base 7: mod_base = OTHER; note = 2'-O-methyluridine-3'-phosphate
  modified_base 8: mod_base = OTHER; note = 2'-deoxy-2'-fluoroadenosine-3'-phosphate
  modified_base 9: mod_base = OTHER; note = 2'-deoxy-2'-fluorocytidine-3'-phosphate
  modified_base 10: mod_base = OTHER; note = 2'-O-methyluridine-3'-phosphate
  modified_base 11: mod_base = OTHER; note = 2'-O-methylguanosine-3'-phosphate
  modified_base 12: mod_base = OTHER; note = 2'-O-methyladenosine-3'-phosphate
  modified_base 13: mod_base = OTHER; note = 2'-O-methyluridine-3'-phosphate
  modified_base 14: mod_base = OTHER; note = 2'-deoxy-2'-fluorouridine-3'-phosphate
  modified_base 15: mod_base = OTHER; note = 2'-O-methyluridine-3'-phosphate
  modified_base 16: mod_base = OTHER; note = 2'-deoxy-2'-fluoroadenosine-3'-phosphate
  modified_base 17: mod_base = OTHER; note = 2'-O-methylcytidine-3'-phosphate
  modified_base 18: mod_base = OTHER; note = 2'-O-methylcytidine-3'-phosphate
  modified_base 19: mod_base = OTHER; note = 2'-O-methylcytidine-3'-phosphate
  modified_base 20: mod_base = OTHER; note = 2'-O-methyluridine-3'-phosphate
  modified_base 21: mod_base = OTHER; note = 2'-O-methyladenosine-3'-phosphorothioate
  modified_base 22: mod_base = OTHER; note = 2'-O-methylcytidine-3'-phosphorothioate
  modified_base 23: mod_base = OTHER; note = 2'-O-methylcytidine
tcctcttactgatttaccctacc

SEQ ID NO: 2005 - RNA, 23 nt, synthetic construct
  source 1..23: mol_type = other RNA
  modified_base 1: mod_base = OTHER; note = 2'-O-methyluridine-3'-phosphorothioate 5'-(E)-Vinylphosphonate
  modified_base 2: mod_base = OTHER; note = 2'-deoxy-2'-fluoroadenosine-3'-phosphorothioate
  modified_base 3: mod_base = OTHER; note = 2'-O-methylcytidine-3'-phosphate
  modified_base 4: mod_base = OTHER; note = 2'-O-methylcytidine-3'-phosphate
  modified_base 5: mod_base = OTHER; note = 2'-O-methyluridine-3'-phosphate
  modified_base 6: mod_base = OTHER; note = 2'-deoxy-2'-fluorocytidine-3'-phosphate
  modified_base 7: mod_base = OTHER; note = 2'-O-methyluridine-3'-phosphate
  modified_base 8: mod_base = OTHER; note = 2'-deoxy-2'-fluorouridine-3'-phosphate
  modified_base 9: mod_base = OTHER; note = 2'-deoxy-2'-fluoroadenosine-3'-phosphate
  modified_base 10: mod_base = OTHER; note = 2'-O-methylcytidine-3'-phosphate
  modified_base 11: mod_base = OTHER; note = 2'-O-methyluridine-3'-phosphate
  modified_base 12: mod_base = OTHER; note = 2'-O-methylguanosine-3'-phosphate
  modified_base 13: mod_base = OTHER; note = 2'-O-methyladenosine-3'-phosphate
  modified_base 14: mod_base = OTHER; note = 2'-deoxy-2'-fluorouridine-3'-phosphate
  modified_base 15: mod_base = OTHER; note = 2'-O-methyluridine-3'-phosphate
  modified_base 16: mod_base = OTHER; note = 2'-deoxy-2'-fluorouridine-3'-phosphate
  modified_base 17: mod_base = OTHER; note = 2'-O-methyladenosine-3'-phosphate
  modified_base 18: mod_base = OTHER; note = 2'-O-methylcytidine-3'-phosphate
  modified_base 19: mod_base = OTHER; note = 2'-O-methylcytidine-3'-phosphate
  modified_base 20: mod_base = OTHER; note = 2'-O-methylcytidine-3'-phosphate
  modified_base 21: mod_base = OTHER; note = 2'-O-methyluridine-3'-phosphorothioate
  modified_base 22: mod_base = OTHER; note = 2'-O-methyladenosine-3'-phosphorothioate
  modified_base 23: mod_base = OTHER; note = 2'-O-methylcytidine
tacctcttactgatttaccctac

SEQ ID NO: 2006 - RNA, 23 nt, synthetic construct
  source 1..23: mol_type = other RNA
  modified_base 1: mod_base = OTHER; note = 2'-O-methyluridine-3'-phosphorothioate 5'-(E)-Vinylphosphonate
  modified_base 2: mod_base = OTHER; note = 2'-deoxy-2'-fluoroadenosine-3'-phosphorothioate
  modified_base 3: mod_base = OTHER; note = 2'-O-methylcytidine-3'-phosphate
  modified_base 4: mod_base = OTHER; note = 2'-O-methyladenosine-3'-phosphate
  modified_base 5: mod_base = OTHER; note = 2'-O-methylcytidine-3'-phosphate
  modified_base 6: mod_base = OTHER; note = 2'-deoxy-2'-fluorocytidine-3'-phosphate
  modified_base 7: mod_base = OTHER; note = 2'-O-methyluridine-3'-phosphate
  modified_base 8: mod_base = OTHER; note = 2'-deoxy-2'-fluorocytidine-3'-phosphate
  modified_base 9: mod_base = OTHER; note = 2'-deoxy-2'-fluorouridine-3'-phosphate
  modified_base 10: mod_base = OTHER; note = 2'-O-methyluridine-3'-phosphate
  modified_base 11: mod_base = OTHER; note = 2'-O-methyladenosine-3'-phosphate
  modified_base 12: mod_base = OTHER; note = 2'-O-methylcytidine-3'-phosphate
  modified_base 13: mod_base = OTHER; note = 2'-O-methyluridine-3'-phosphate
  modified_base 14: mod_base = OTHER; note = 2'-deoxy-2'-fluoroguanosine-3'-phosphate
  modified_base 15: mod_base = OTHER; note = 2'-O-methyladenosine-3'-phosphate
  modified_base 16: mod_base = OTHER; note = 2'-deoxy-2'-fluorouridine-3'-phosphate
  modified_base 17: mod_base = OTHER; note = 2'-O-methyluridine-3'-phosphate
  modified_base 18: mod_base = OTHER; note = 2'-O-methyluridine-3'-phosphate
  modified_base 19: mod_base = OTHER; note = 2'-O-methyladenosine-3'-phosphate
  modified_base 20: mod_base = OTHER; note = 2'-O-methylcytidine-3'-phosphate
  modified_base 21: mod_base = OTHER; note = 2'-O-methylcytidine-3'-phosphorothioate
  modified_base 22: mod_base = OTHER; note = 2'-O-methylcytidine-3'-phosphorothioate
  modified_base 23: mod_base = OTHER; note = 2'-O-methyluridine
tacacctcttactgatttaccct

SEQ ID NO: 2007 - RNA, 23 nt, synthetic construct
  source 1..23: mol_type = other RNA
  modified_base 1: mod_base = OTHER; note = 2'-O-methyluridine-3'-phosphorothioate 5'-(E)-Vinylphosphonate
  modified_base 2: mod_base = OTHER; note = 2'-deoxy-2'-fluoroadenosine-3'-phosphorothioate
  modified_base 3: mod_base = OTHER; note = 2'-O-methyladenosine-3'-phosphate
  modified_base 4: mod_base = OTHER; note = 2'-O-methylcytidine-3'-phosphate
  modified_base 5: mod_base = OTHER; note = 2'-O-methyladenosine-3'-phosphate
  modified_base 6: mod_base = OTHER; note = 2'-deoxy-2'-fluorocytidine-3'-phosphate
  modified_base 7: mod_base = OTHER; note = 2'-O-methylcytidine-3'-phosphate
  modified_base 8: mod_base = OTHER; note = 2'-deoxy-2'-fluorouridine-3'-phosphate
  modified_base 9: mod_base = OTHER; note = 2'-deoxy-2'-fluorocytidine-3'-phosphate
  modified_base 10: mod_base = OTHER; note = 2'-O-methyluridine-3'-phosphate
  modified_base 11: mod_base = OTHER; note = 2'-O-methyluridine-3'-phosphate
  modified_base 12: mod_base = OTHER; note = 2'-O-methyladenosine-3'-phosphate
  modified_base 13: mod_base = OTHER; note = 2'-O-methylcytidine-3'-phosphate
  modified_base 14: mod_base = OTHER; note = 2'-deoxy-2'-fluorouridine-3'-phosphate
  modified_base 15: mod_base = OTHER; note = 2'-O-methylguanosine-3'-phosphate
  modified_base 16: mod_base = OTHER; note = 2'-deoxy-2'-fluoroadenosine-3'-phosphate
  modified_base 17: mod_base = OTHER; note = 2'-O-methyluridine-3'-phosphate
  modified_base 18: mod_base = OTHER; note = 2'-O-methyluridine-3'-phosphate
  modified_base 19: mod_base = OTHER; note = 2'-O-methyluridine-3'-phosphate
  modified_base 20: mod_base = OTHER; note = 2'-O-methyladenosine-3'-phosphate
  modified_base 21: mod_base = OTHER; note = 2'-O-methylcytidine-3'-phosphorothioate
  modified_base 22: mod_base = OTHER; note = 2'-O-methylcytidine-3'-phosphorothioate
  modified_base 23: mod_base = OTHER; note = 2'-O-methylcytidine
taacacctcttactgatttaccc

SEQ ID NO: 2008 - RNA, 23 nt, synthetic construct
  source 1..23: mol_type = other RNA
  modified_base 1: mod_base = OTHER; note = 2'-O-methyluridine-3'-phosphorothioate 5'-(E)-Vinylphosphonate
  modified_base 2: mod_base = OTHER; note = 2'-deoxy-2'-fluoroguanosine-3'-phosphorothioate
  modified_base 3: mod_base = OTHER; note = 2'-O-methylguanosine-3'-phosphate
  modified_base 4: mod_base = OTHER; note = 2'-O-methyladenosine-3'-phosphate
  modified_base 5: mod_base = OTHER; note = 2'-O-methyluridine-3'-phosphate
  modified_base 6: mod_base = OTHER; note = 2'-deoxy-2'-fluoroadenosine-3'-phosphate
  modified_base 7: mod_base = OTHER; note = 2'-O-methyladenosine-3'-phosphate
  modified_base 8: mod_base = OTHER; note = 2'-deoxy-2'-fluoroadenosine-3'-phosphate
  modified_base 9: mod_base = OTHER; note = 2'-deoxy-2'-fluoroadenosine-3'-phosphate
  modified_base 10: mod_base = OTHER; note = 2'-O-methylguanosine-3'-phosphate
  modified_base 11: mod_base = OTHER; note = 2'-O-methylguanosine-3'-phosphate
  modified_base 12: mod_base = OTHER; note = 2'-O-methylcytidine-3'-phosphate
  modified_base 13: mod_base = OTHER; note = 2'-O-methyladenosine-3'-phosphate
  modified_base 14: mod_base = OTHER; note = 2'-deoxy-2'-fluoroadenosine-3'-phosphate
  modified_base 15: mod_base = OTHER; note = 2'-O-methylcytidine-3'-phosphate
  modified_base 16: mod_base = OTHER; note = 2'-deoxy-2'-fluorouridine-3'-phosphate
  modified_base 17: mod_base = OTHER; note = 2'-O-methylguanosine-3'-phosphate
  modified_base 18: mod_base = OTHER; note = 2'-O-methylguanosine-3'-phosphate
  modified_base 19: mod_base = OTHER; note = 2'-O-methyluridine-3'-phosphate
  modified_base 20: mod_base = OTHER; note = 2'-O-methyladenosine-3'-phosphate
  modified_base 21: mod_base = OTHER; note = 2'-O-methyladenosine-3'-phosphorothioate
  modified_base 22: mod_base = OTHER; note = 2'-O-methyladenosine-3'-phosphorothioate
  modified_base 23: mod_base = OTHER; note = 2'-O-methylcytidine
tggataaaaggcaactggtaaac

SEQ ID NO: 2009 - RNA, 23 nt, synthetic construct
  source 1..23: mol_type = other RNA
  modified_base 1: mod_base = OTHER; note = 2'-O-methyluridine-3'-phosphorothioate 5'-(E)-Vinylphosphonate
  modified_base 2: mod_base = OTHER; note = 2'-deoxy-2'-fluoroguanosine-3'-phosphorothioate
  modified_base 3: mod_base = OTHER; note = 2'-O-methylguanosine-3'-phosphate
  modified_base 4: mod_base = OTHER; note = 2'-O-methylguanosine-3'-phosphate
  modified_base 5: mod_base = OTHER; note = 2'-O-methyladenosine-3'-phosphate
  modified_base 6: mod_base = OTHER; note = 2'-deoxy-2'-fluorouridine-3'-phosphate
  modified_base 7: mod_base = OTHER; note = 2'-O-methyladenosine-3'-phosphate
  modified_base 8: mod_base = OTHER; note = 2'-deoxy-2'-fluoroadenosine-3'-phosphate
  modified_base 9: mod_base = OTHER; note = 2'-deoxy-2'-fluoroadenosine-3'-phosphate
  modified_base 10: mod_base = OTHER; note = 2'-O-methyladenosine-3'-phosphate
  modified_base 11: mod_base = OTHER; note = 2'-O-methylguanosine-3'-phosphate
  modified_base 12: mod_base = OTHER; note = 2'-O-methylguanosine-3'-phosphate
  modified_base 13: mod_base = OTHER; note = 2'-O-methylcytidine-3'-phosphate
  modified_base 14: mod_base = OTHER; note = 2'-deoxy-2'-fluoroadenosine-3'-phosphate
  modified_base 15: mod_base = OTHER; note = 2'-O-methyladenosine-3'-phosphate
  modified_base 16: mod_base = OTHER; note = 2'-deoxy-2'-fluorocytidine-3'-phosphate
  modified_base 17: mod_base = OTHER; note = 2'-O-methyluridine-3'-phosphate
  modified_base 18: mod_base = OTHER; note = 2'-O-methylguanosine-3'-phosphate
  modified_base 19: mod_base = OTHER; note = 2'-O-methylguanosine-3'-phosphate
  modified_base 20: mod_base = OTHER; note = 2'-O-methyluridine-3'-phosphate
  modified_base 21: mod_base = OTHER; note = 2'-O-methyladenosine-3'-phosphorothioate
  modified_base 22: mod_base = OTHER; note = 2'-O-methyladenosine-3'-phosphorothioate
  modified_base 23: mod_base = OTHER; note = 2'-O-methyladenosine
tgggataaaaggcaactggtaaa

SEQ ID NO: 2010 - RNA, 23 nt, synthetic construct
  source 1..23: mol_type = other RNA
  modified_base 1: mod_base = OTHER; note = 2'-O-methyluridine-3'-phosphorothioate 5'-(E)-Vinylphosphonate
  modified_base 2: mod_base = OTHER; note = 2'-deoxy-2'-fluoroguanosine-3'-phosphorothioate
  modified_base 3: mod_base = OTHER; note = 2'-O-methyluridine-3'-phosphate
  modified_base 4: mod_base = OTHER; note = 2'-O-methyluridine-3'-phosphate
  modified_base 5: mod_base = OTHER; note = 2'-O-methyladenosine-3'-phosphate
  modified_base 6: mod_base = OTHER; note = 2'-deoxy-2'-fluorocytidine-3'-phosphate
  modified_base 7: mod_base = OTHER; note = 2'-O-methyladenosine-3'-phosphate
  modified_base 8: mod_base = OTHER; note = 2'-deoxy-2'-fluoroadenosine-3'-phosphate
  modified_base 9: mod_base = OTHER; note = 2'-deoxy-2'-fluorocytidine-3'-phosphate
  modified_base 10: mod_base = OTHER; note = 2'-O-methyladenosine-3'-phosphate
  modified_base 11: mod_base = OTHER; note = 2'-O-methyladenosine-3'-phosphate
  modified_base 12: mod_base = OTHER; note = 2'-O-methylcytidine-3'-phosphate
  modified_base 13: mod_base = OTHER; note = 2'-O-methyluridine-3'-phosphate
  modified_base 14: mod_base = OTHER; note = 2'-deoxy-2'-fluorouridine-3'-phosphate
  modified_base 15: mod_base = OTHER; note = 2'-O-methyluridine-3'-phosphate
  modified_base 16: mod_base = OTHER; note = 2'-deoxy-2'-fluoroguanosine-3'-phosphate
  modified_base 17: mod_base = OTHER; note = 2'-O-methylguanosine-3'-phosphate
  modified_base 18: mod_base = OTHER; note = 2'-O-methylguanosine-3'-phosphate
  modified_base 19: mod_base = OTHER; note = 2'-O-methyladenosine-3'-phosphate
  modified_base 20: mod_base = OTHER; note = 2'-O-methyluridine-3'-phosphate
  modified_base 21: mod_base = OTHER; note = 2'-O-methyladenosine-3'-phosphorothioate
  modified_base 22: mod_base = OTHER; note = 2'-O-methyladenosine-3'-phosphorothioate
  modified_base 23: mod_base = OTHER; note = 2'-O-methyladenosine
tgttacaacaactttgggataaa

SEQ ID NO: 2011 - RNA, 23 nt, synthetic construct
  source 1..23: mol_type = other RNA
  modified_base 1: mod_base = OTHER; note = 2'-O-methyluridine-3'-phosphorothioate 5'-(E)-Vinylphosphonate
  modified_base 2: mod_base = OTHER; note = 2'-deoxy-2'-fluorocytidine-3'-phosphorothioate
  modified_base 3: mod_base = OTHER; note = 2'-O-methyladenosine-3'-phosphate
  modified_base 4: mod_base = OTHER; note = 2'-O-methylguanosine-3'-phosphate
  modified_base 5: mod_base = OTHER; note = 2'-O-methylguanosine-3'-phosphate
  modified_base 6: mod_base = OTHER; note = 2'-deoxy-2'-fluorouridine-3'-phosphate
  modified_base 7: mod_base = OTHER; note = 2'-O-methyluridine-3'-phosphate
  modified_base 8: mod_base = OTHER; note = 2'-deoxy-2'-fluoroadenosine-3'-phosphate
  modified_base 9: mod_base = OTHER; note = 2'-deoxy-2'-fluorocytidine-3'-phosphate
  modified_base 10: mod_base = OTHER; note = 2'-O-methyladenosine-3'-phosphate
  modified_base 11: mod_base = OTHER; note = 2'-O-methyladenosine-3'-phosphate
  modified_base 12: mod_base = OTHER; note = 2'-O-methylcytidine-3'-phosphate
  modified_base 13: mod_base = OTHER; note = 2'-O-methyladenosine-3'-phosphate
  modified_base 14: mod_base = OTHER; note = 2'-deoxy-2'-fluoroadenosine-3'-phosphate
  modified_base 15: mod_base = OTHER; note = 2'-O-methylcytidine-3'-phosphate
  modified_base 16: mod_base = OTHER; note = 2'-deoxy-2'-fluorouridine-3'-phosphate
  modified_base 17: mod_base = OTHER; note = 2'-O-methyluridine-3'-phosphate
  modified_base 18: mod_base = OTHER; note = 2'-O-methyluridine-3'-phosphate
  modified_base 19: mod_base = OTHER; note = 2'-O-methylguanosine-3'-phosphate
  modified_base 20: mod_base = OTHER; note = 2'-O-methylguanosine-3'-phosphate
  modified_base 21: mod_base = OTHER; note = 2'-O-methylguanosine-3'-phosphorothioate
  modified_base 22: mod_base = OTHER; note = 2'-O-methyladenosine-3'-phosphorothioate
  modified_base 23: mod_base = OTHER; note = 2'-O-methyluridine
tcaggttacaacaactttgggat

SEQ ID NO: 2012 - RNA, 23 nt, synthetic construct
  source 1..23: mol_type = other RNA
  modified_base 1: mod_base = OTHER; note = 2'-O-methyluridine-3'-phosphorothioate 5'-(E)-Vinylphosphonate
  modified_base 2: mod_base = OTHER; note = 2'-deoxy-2'-fluorouridine-3'-phosphorothioate
  modified_base 3: mod_base = OTHER; note = 2'-O-methyluridine-3'-phosphate
  modified_base 4: mod_base = OTHER; note = 2'-O-methylcytidine-3'-phosphate
  modified_base 5: mod_base = OTHER; note = 2'-O-methylguanosine-3'-phosphate
  modified_base 6: mod_base = OTHER; note = 2'-deoxy-2'-fluoroadenosine-3'-phosphate
  modified_base 7: mod_base = OTHER; note = 2'-O-methyladenosine-3'-phosphate
  modified_base 8: mod_base = OTHER; note = 2'-deoxy-2'-fluorouridine-3'-phosphate
  modified_base 9: mod_base = OTHER; note = 2'-deoxy-2'-fluorocytidine-3'-phosphate
  modified_base 10: mod_base = OTHER; note = 2'-O-methyladenosine-3'-phosphate
  modified_base 11: mod_base = OTHER; note = 2'-O-methyladenosine-3'-phosphate
  modified_base 12: mod_base = OTHER; note = 2'-O-methyluridine-3'-phosphate
  modified_base 13: mod_base = OTHER; note = 2'-O-methylcytidine-3'-phosphate
  modified_base 14: mod_base = OTHER; note = 2'-deoxy-2'-fluorocytidine-3'-phosphate
  modified_base 15: mod_base = OTHER; note = 2'-O-methyladenosine-3'-phosphate
  modified_base 16: mod_base = OTHER; note = 2'-deoxy-2'-fluoroadenosine-3'-phosphate
  modified_base 17: mod_base = OTHER; note = 2'-O-methylcytidine-3'-phosphate
  modified_base 18: mod_base = OTHER; note = 2'-O-methyladenosine-3'-phosphate
  modified_base 19: mod_base = OTHER; note = 2'-O-methylguanosine-3'-phosphate
  modified_base 20: mod_base = OTHER; note = 2'-O-methyluridine-3'-phosphate
  modified_base 21: mod_base = OTHER; note = 2'-O-methyladenosine-3'-phosphorothioate
  modified_base 22: mod_base = OTHER; note = 2'-O-methylguanosine-3'-phosphorothioate
  modified_base 23: mod_base = OTHER; note = 2'-O-methylcytidine
tttcgaatcaatccaacagtagc

SEQ ID NO: 2013 - RNA, 23 nt, synthetic construct
  source 1..23: mol_type = other RNA
ggactctggaatccattctggtg

SEQ ID NO: 2014 - RNA, 23 nt, synthetic construct
  source 1..23: mol_type = other RNA
gactctggaatccattctggtgc

SEQ ID NO: 2015 - RNA, 23 nt, synthetic construct
  source 1..23: mol_type = other RNA
gctgctcatcccactaatgtcca

SEQ ID NO: 2016 - RNA, 23 nt, synthetic construct
  source 1..23: mol_type = other RNA
tgctcatcccactaatgtccagc

SEQ ID NO: 2017 - RNA, 23 nt, synthetic construct
  source 1..23: mol_type = other RNA
taccatgcagaatacaaatgatg

SEQ ID NO: 2018 - RNA, 23 nt, synthetic construct
  source 1..23: mol_type = other RNA
accatgcagaatacaaatgatgt

SEQ ID NO: 2019 - RNA, 23 nt, synthetic construct
  source 1..23: mol_type = other RNA
caagaaggagctaaaatggcagt

SEQ ID NO: 2020 - RNA, 23 nt, synthetic construct
  source 1..23: mol_type = other RNA
aaggagctaaaatggcagtgcgt

SEQ ID NO: 2021 - RNA, 23 nt, synthetic construct
  source 1..23: mol_type = other RNA
cttactggccatctttaagtctg

SEQ ID NO: 2022 - RNA, 23 nt, synthetic construct
  source 1..23: mol_type = other RNA
ttactggccatctttaagtctgg

SEQ ID NO: 2023 - RNA, 23 nt, synthetic construct
  source 1..23: mol_type = other RNA
tactggccatctttaagtctgga

SEQ ID NO: 2024 - RNA, 23 nt, synthetic construct
  source 1..23: mol_type = other RNA
tctaacctcacttgcaataatta

SEQ ID NO: 2025 - RNA, 23 nt, synthetic construct
  source 1..23: mol_type = other RNA
ctaacctcacttgcaataattat

SEQ ID NO: 2026 - RNA, 23 nt, synthetic construct
  source 1..23: mol_type = other RNA
ctgccatctgtgctcttcgtcat

SEQ ID NO: 2027 - RNA, 23 nt, synthetic construct
  source 1..23: mol_type = other RNA
tgccatctgtgctcttcgtcatc

SEQ ID NO: 2028 - RNA, 23 nt, synthetic construct
  source 1..23: mol_type = other RNA
ccatctgtgctcttcgtcatctg

SEQ ID NO: 2029 - RNA, 23 nt, synthetic construct
  source 1..23: mol_type = other RNA
catctgtgctcttcgtcatctga

SEQ ID NO: 2030 - RNA, 23 nt, synthetic construct
  source 1..23: mol_type = other RNA
atctgtgctcttcgtcatctgac

SEQ ID NO: 2031 - RNA, 23 nt, synthetic construct
  source 1..23: mol_type = other RNA
tctgtgctcttcgtcatctgacc

SEQ ID NO: 2032 - RNA, 23 nt, synthetic construct
  source 1..23: mol_type = other RNA
ctgtgctcttcgtcatctgacca

SEQ ID NO: 2033 - RNA, 23 nt, synthetic construct
  source 1..23: mol_type = other RNA
ctactgttggattgattcgaaat

SEQ ID NO: 2034 - RNA, 23 nt, synthetic construct
  source 1..23: mol_type = other RNA
ctaaataccattccattgtttgt

SEQ ID NO: 2035 - RNA, 23 nt, synthetic construct
  source 1..23: mol_type = other RNA
aataccattccattgtttgtgca

SEQ ID NO: 2036 - RNA, 23 nt, synthetic construct
  source 1..23: mol_type = other RNA
taccattccattgtttgtgcagc

SEQ ID NO: 2037 - RNA, 23 nt, synthetic construct
  source 1..23: mol_type = other RNA
gggtcctctgtgaacttgctcag

SEQ ID NO: 2038 - RNA, 23 nt, synthetic construct
  source 1..23: mol_type = other RNA
ggtcctctgtgaacttgctcagg

SEQ ID NO: 2039 - RNA, 23 nt, synthetic construct
  source 1..23: mol_type = other RNA
ctatcgttcttttcactctggtg

SEQ ID NO: 2040 - RNA, 23 nt, synthetic construct
  source 1..23: mol_type = other RNA
tatcgttcttttcactctggtgg

SEQ ID NO: 2041 - RNA, 23 nt, synthetic construct
  source 1..23: mol_type = other RNA
cctggtgctgactatccagttga

SEQ ID NO: 2042 - RNA, 23 nt, synthetic construct
  source 1..23: mol_type = other RNA
gtgctgactatccagttgatggg

SEQ ID NO: 2043 - RNA, 23 nt, synthetic construct
  source 1..23: mol_type = other RNA
tgctgactatccagttgatgggc

SEQ ID NO: 2044 - RNA, 23 nt, synthetic construct
  source 1..23: mol_type = other RNA
ctgactatccagttgatgggctg

SEQ ID NO: 2045 - RNA, 23 nt, synthetic construct
  source 1..23: mol_type = other RNA
tgattggcctgtagagttgctga

SEQ ID NO: 2046 - RNA, 23 nt, synthetic construct
  source 1..23: mol_type = other RNA
tgggctggtatctcagaaagtgc

SEQ ID NO: 2047 - RNA, 23 nt, synthetic construct
  source 1..23: mol_type = other RNA
gggctggtatctcagaaagtgcc

SEQ ID NO: 2048 - RNA, 23 nt, synthetic construct
  source 1..23: mol_type = other RNA
gctggtatctcagaaagtgcctg

SEQ ID NO: 2049 - RNA, 23 nt, synthetic construct
  source 1..23: mol_type = other RNA
gcctgacacactaaccaagctga

SEQ ID NO: 2050 - RNA, 23 nt, synthetic construct
  source 1..23: mol_type = other RNA
ctaaccaagctgagtttcctatg

SEQ ID NO: 2051 - RNA, 23 nt, synthetic construct
  source 1..23: mol_type = other RNA
aaccaagctgagtttcctatggg

SEQ ID NO: 2052 - RNA, 23 nt, synthetic construct
  source 1..23: mol_type = other RNA
accaagctgagtttcctatggga

SEQ ID NO: 2053 - RNA, 23 nt, synthetic construct
  source 1..23: mol_type = other RNA
ccaagctgagtttcctatgggaa

SEQ ID NO: 2054 - RNA, 23 nt, synthetic construct
  source 1..23: mol_type = other RNA
caagctgagtttcctatgggaac

SEQ ID NO: 2055 - RNA, 23 nt, synthetic construct
  source 1..23: mol_type = other RNA
ttttgttctggtcctttttggtc

SEQ ID NO: 2056 - RNA, 23 nt, synthetic construct
  source 1..23: mol_type = other RNA
tttgttctggtcctttttggtcg

SEQ ID NO: 2057 - RNA, 23 nt, synthetic construct
  source 1..23: mol_type = other RNA
ttgttctggtcctttttggtcga

SEQ ID NO: 2058 - RNA, 23 nt, synthetic construct
  source 1..23: mol_type = other RNA
tgttctggtcctttttggtcgag

SEQ ID NO: 2059 - RNA, 23 nt, synthetic construct
  source 1..23: mol_type = other RNA
gttctggtcctttttggtcgagg

SEQ ID NO: 2060 - RNA, 23 nt, synthetic construct
  source 1..23: mol_type = other RNA
ttctggtcctttttggtcgagga

SEQ ID NO: 2061 - RNA, 23 nt, synthetic construct
  source 1..23: mol_type = other RNA
tcgaggagtaacaatacaaatgg

SEQ ID NO: 2062 - RNA, 23 nt, synthetic construct
  source 1..23: mol_type = other RNA
taatggtgtagaacactaattca

SEQ ID NO: 2063 - RNA, 23 nt, synthetic construct
  source 1..23: mol_type = other RNA
atggtgtagaacactaattcata

SEQ ID NO: 2064 - RNA, 23 nt, synthetic construct
  source 1..23: mol_type = other RNA
tggtgtagaacactaattcataa

SEQ ID NO: 2065 - RNA, 23 nt, synthetic construct
  source 1..23: mol_type = other RNA
tgtagaacactaattcataatca

SEQ ID NO: 2066 - RNA, 23 nt, synthetic construct
  source 1..23: mol_type = other RNA
tagaacactaattcataatcact

SEQ ID NO: 2067 - RNA, 23 nt, synthetic construct
  source 1..23: mol_type = other RNA
tatgcttaaaataagcaggtgga

SEQ ID NO: 2068 - RNA, 23 nt, synthetic construct
  source 1..23: mol_type = other RNA
aataagcaggtggatctatttca

SEQ ID NO: 2069 - RNA, 23 nt, synthetic construct
  source 1..23: mol_type = other RNA
taagcaggtggatctatttcatg

SEQ ID NO: 2070 - RNA, 23 nt, synthetic construct
  source 1..23: mol_type = other RNA
aagcaggtggatctatttcatgt

SEQ ID NO: 2071 - RNA, 23 nt, synthetic construct
  source 1..23: mol_type = other RNA
caggtggatctatttcatgtttt

SEQ ID NO: 2072 - RNA, 23 nt, synthetic construct
  source 1..23: mol_type = other RNA
aggtggatctatttcatgttttt

SEQ ID NO: 2073 - RNA, 23 nt, synthetic construct
  source 1..23: mol_type = other RNA
gtggatctatttcatgtttttga

SEQ ID NO: 2074 - RNA, 23 nt, synthetic construct
  source 1..23: mol_type = other RNA
atgggtagggtaaatcagtaaga

SEQ ID NO: 2075 - RNA, 23 nt, synthetic construct
  source 1..23: mol_type = other RNA
gggtagggtaaatcagtaagagg

SEQ ID NO: 2076 - RNA, 23 nt, synthetic construct
  source 1..23: mol_type = other RNA
ggtagggtaaatcagtaagaggt

SEQ ID NO: 2077 - RNA, 23 nt, synthetic construct
  source 1..23: mol_type = other RNA
gtagggtaaatcagtaagaggtg

SEQ ID NO: 2078 - RNA, 23 nt, synthetic construct
  source 1..23: mol_type = other RNA
agggtaaatcagtaagaggtgtt

SEQ ID NO: 2079 - RNA, 23 nt, synthetic construct
  source 1..23: mol_type = other RNA
gggtaaatcagtaagaggtgtta

SEQ ID NO: 2080 - RNA, 23 nt, synthetic construct
  source 1..23: mol_type = other RNA
gtttaccagttgccttttatccc

SEQ ID NO: 2081 - RNA, 23 nt, synthetic construct
  source 1..23: mol_type = other RNA
tttaccagttgccttttatccca

SEQ ID NO: 2082 - RNA, 23 nt, synthetic construct
  source 1..23: mol_type = other RNA
tttatcccaaagttgttgtaacc

SEQ ID NO: 2083 - RNA, 23 nt, synthetic construct
  source 1..23: mol_type = other RNA
atcccaaagttgttgtaacctgc

SEQ ID NO: 2084 - RNA, 23 nt, synthetic construct
  source 1..23: mol_type = other RNA
gctactgttggattgattcgaaa